(19) United States
(12) Patent Application Publication
(10) Pub. No.: US 2003/0104426 A1
(43) Pub. Date: Jun. 5, 2003

(54) Signature genes in chronic myelogenous leukemia

(76) Inventors: Peter S. Linsley, Seattle, WA (US); Mao Mao, Kirkland, WA (US); Hongyue Dai, Bothell, WA (US); Yudong He, Kirkland, WA (US); Jerald Patrick Radich, Sammamish, WA (US)

Correspondence Address: PENNIE AND EDMONDS, 1155 AVENUE OF THE AMERICAS, NEW YORK, NY, 100362711

(21) Appl. No.: 10/171,581

(22) Filed: Jun. 14, 2002

Related U.S. Application Data
(60) Provisional application No. 60/298,914, filed on Jun. 18, 2001.

(51) Int. Cl. C12Q 1/68; G06F 19/00; G01N 33/48; G01N 33/50

(52) U.S. Cl. 435/6; 702/20

(57) ABSTRACT

The present invention relates to genetic markers whose expression is correlated with progression of CML. Specifically, the invention provides sets of markers whose expression patterns can be used to differentiate chronic phase individuals from those in blast crisis. The invention relates to methods of using these markers to distinguish these conditions. The invention also relates to kits containing ready-to-use microarrays and computer software for data analysis using the statistical methods disclosed herein.

[0001] This application claims benefit of U.S. Provisional Application No. 60/298,914, filed Jun. 18, 2001, which is incorporated by reference herein in its entirety.

[0002] This application includes a Sequence Listing submitted on compact disc, recorded on two compact discs, including one duplicate, containing Filename 9301157999.txt, of size 999,424 bytes, created Jun. 12, 2002. The sequence listing on the compact discs is incorporated by reference herein in its entirety.

### 1. FIELD OF THE INVENTION

[0003] The present invention relates to the identification of expression changes that occur in the evolution from the chronic phase to blast crisis of chronic myeloid leukemia (CML).

### 2. BACKGROUND OF THE INVENTION

[0004] Chronic myeloid leukemia (CML) is a clonal disease that acquires genetic change in a pluripotential hematopoietic stem cell. The altered stem cell proliferates and generates a population of differentiated cells that gradually replaces normal hematopoiesis and leads to a greatly expanded total myeloid mass. One important landmark in the study of CML was the discovery of the Philadelphia (Ph) chromosome in 1960; another was the characterization in 1986 of the BCR-ABL chimeric gene. Until the 1980s, CML was assumed to be incurable. Palliative treatments included radiotherapy and, more recently, alkylating agents, notably busulphan. It has become apparent in the last 20 years that CML can be cured by bone marrow transplantation (BMT), but the proportion of patients eligible for BMT is still relatively small.

[0005] The incidence of CML appears to be constant worldwide. It occurs in about 1.0 to 1.5 per 100,000 of the population in all countries where statistics are adequate. CML is a biphasic or triphasic disease that is usually diagnosed in the initial ‘chronic’ or stable phase. The chronic phase lasts typically for 2-7 years. In about 50% patients, the chronic phase transforms unpredictably and abruptly to a more aggressive phase, blast crisis. In the other half of patients, the disease evolves somewhat more gradually, through an intermediate phase described as “accelerated” disease, which may last for months, before transformation to blast crisis. The duration of survival after the onset of transformation is usually only 2-6 months.

[0006] In clinical practice, accurate determination of the different phases of CML is important because treatment options, prognosis, and the likelihood of therapeutic response all vary broadly depending on the determination. To date, no set of marker genes that can be used to distinguish chronic phase and blast crisis of CML.

### 3. SUMMARY OF THE INVENTION

[0007] The invention provides gene marker sets that distinguish chronic phase CML from blast crisis CML, and methods of use therefor. In one embodiment, the invention provides a method for classifying a cell sample as blast crisis or chronic phase CML comprising detecting a difference in the expression of a first plurality of genes relative to a control, said first plurality of genes consisting of at least 5 of the genes corresponding to the markers listed in Table 1. In specific embodiments, said plurality of genes consists of at least 50, 100, 200, or 300 of the gene markers listed in Table 1. In another specific embodiment, said control comprises nucleic acids derived from a pool of samples from individual chronic phase patients.

[0008] The invention further provides a method for classifying a sample as chronic phase or blast crisis by calculating the similarity between the expression of at least 5 of the markers listed in Table 1 in the sample to the expression of the same markers in an chronic phase nucleic acid pool and an blast phase nucleic acid pool, comprising the steps of: (a) labeling nucleic acids derived from a sample, with a first fluorophore to obtain a first pool of fluorophore-labeled nucleic acids; (b) labeling with a second fluorophore a first pool of nucleic acids derived from two or more chronic phase samples, and a second pool of nucleic acids derived from two or more blast phase samples; (c) contacting said first fluorophore-labeled nucleic acid and said first pool of second fluorophore-labeled nucleic acid with said first microarray under conditions such that hybridization can occur, and contacting said first fluorophore-labeled nucleic acid and said second pool of second fluorophore-labeled nucleic acid with said second microarray under conditions such that hybridization can occur, detecting at each of a plurality of discrete loci on the first microarray a first flourescent emission signal from said first fluorophore-labeled nucleic acid and a second fluorescent emission signal from said first pool of second fluorophore-labeled genetic matter that is bound to said first microarray under said conditions, and detecting at each of the marker loci on said second microarray said first fluorescent emission signal from said first fluorophore-labeled nucleic acid and a third fluorescent emission signal from said second pool of second fluorophore-labeled nucleic acid; (d) determining the similarity of the sample to the blast crisis and chronic phase pools by comparing said first fluorescence emission signals and said second fluorescence emission signals, and said first emission signals and said third fluorescence emission signals; and (e) classifying the sample as chronic phase where the first fluorescence emission signals are more similar to said second fluorescence emission signals than to said third fluorescent emission signals, and classifying the sample as blast crisis where the first fluorescence emission signals are more similar to said third fluorescence emission signals than to said second fluorescent emission signals, wherein said first microarray and said second microarray are similar to each other, exact replicas of each other, or are identical, and wherein said similarity is defined by a statistical method such that the cell sample and control are similar where the p value of the similarity is less than 0.01. In a specific embodiment, said similarity is calculated by determining a first sum of the differences of expression levels for each marker between said first fluorophore-labeled nucleic acid and said first pool of second fluorophore-labeled nucleic acid, and a second sum of the differences of expression levels for each marker between said first fluorophore-labeled nucleic acid and said second pool of second fluorophore-labeled nucleic acid, wherein if said first sum is greater than said second sum, the sample is classified as blast crisis, and if said second sum is greater than said first sum, the sample is classified as chronic phase. In another specific embodiment, said similarity is calculated by computing a first classifier parameter P₁ between an chronic phase template and the expression of said markers in said sample, and a second classifier parameter P₂ between an blast crisis template and the expression of said markers in said sample, wherein said P₁ and P₂are calculated according to the formula:

P₁=(\vec{z}ᵢ•\vec{y})/(∥\vec{z}ᵢ∥·∥\vec{y}∥),

[0009] wherein \vec{z}₁ and \vec{z}₂ are blast crisis and chronic phase templates, respectively, and are calculated by averaging said second fluorescence emission signal for each of said markers in said first pool of second fluorophore-labeled nucleic acid and said third fluorescence emission signal for each of said markers in said second pool of second fluorophore-labeled nucleic acid, respectively, and wherein \vec{y} is said first fluorescence emission signal of each of said markers in the sample to be classified as chronic phase or blast crisis, wherein the expression of the markers in the sample is similar to blast crisis if P₁<P₂, and similar to chronic phase if P₁>P₂.

[0010] The invention further provides a method for identifying marker genes associated with a particular phenotype. In one embodiment, the invention provides a method for determining a set of marker genes whose expression is associated with a particular phenotype, comprising the steps of: (a) selecting the phenotype having two or more phenotype categories; (b) identifying a plurality of genes wherein the expression of said genes is correlated or anticorrelated with one of the phenotype categories, and wherein the correlation coefficient for each gene is calculated according to the equation

ρ=(\vec{c}•\vec{r})/(∥\vec{c}∥·∥\vec{r}∥),

[0011] wherein \vec{c} is a number representing said phenotype category and \vec{r} is the logarithmic expression ratio across all the samples for each individual gene, wherein if the correlation coefficient has an absolute value of 0.3 or greater, said expression of said gene is associated with the phenotype category, wherein said plurality of genes is a set of marker genes whose expression is associated with a particular phenotype. In a specific embodiment, said set of marker genes is validated by: (a) using a statistical method to randomize the association between said marker genes and said phenotype category, thereby creating a control correlation coefficient for each marker gene; (b) repeating step (a) one hundred or more times to develop a frequency distribution of said control correlation coefficients for each marker gene; (c) determining the number of marker genes having a control correlation coefficient of 0.3 or above, thereby creating a control marker gene set; and (d) comparing the number of control marker genes so identified to the number of marker genes, wherein if the p value of the difference between the number of marker genes and the number of control genes is less than 0.01, said set of marker genes is validated. In another specific embodiment, said set of marker genes is optimized by the method comprising: (a) rank-ordering the genes by amplitude of correlation or by significance of the correlation coefficients, and (b) selecting an arbitrary number of marker genes from the top of the rank-ordered list.

[0012] The invention further provides microarrays comprising the disclosed marker sets. In one embodiment, the invention provides a microarray for distinguishing chronic phase and blast crisis cell samples comprising a positionally-addressable array of polynucleotide probes bound to a support, said polynucleotide probes comprising a plurality of polynucleotide probes of different nucleotide sequences, each of said different nucleotide sequences comprising a sequence complementary and hybridizable to a plurality of genes, said plurality consisting of at least 5 of the genes corresponding to the markers listed in Table 1. The invention further provides for microarrays comprising at least 20, 50, 100, 200, or 300 of the marker genes listed in Table 1.

[0013] The invention further provides a kit for determining the CML status of a sample, comprising at least two microarrays each comprising at least 20 of the markers listed in Table 1, and a computer system for determining the similarity of the level of nucleic acid derived from the markers listed in Table 1 in a sample to that in a blast crisis pool and a chronic phase pool, the computer system comprising a processor, and a memory encoding one or more programs coupled to the processor, wherein the one or more programs cause the processor to perform a method comprising computing the aggregate differences in expression of each marker between the sample and blast crisis pool and the aggregate differences in expression of each marker between the sample and chronic phase pool, or a method comprising determining the correlation of expression of the markers in the sample to the expression in the blast crisis and chronic phase pools, said correlation calculated according to Equation (3).

### 4. BRIEF DESCRIPTION OF THE FIGURES

[0014] FIG. 1 Experimental procedures for measuring differential changes in mRNA transcript abundance in bone marrow cells used in this study. In each experiment, Cy5-labeled cRNA from one sample X is hybridized on a 25 k human chip together with Cy3-labeled cRNA pool made of cRNA samples from samples 1, 2, . . . N. The digital expression data were obtained by scanning and image processing. The error modeling allowed assignment of a p-value to each transcript ratio measurement.

[0015] FIG. 2 Two-dimensional clustering analysis results of 20 samples and 245 significant genes. Clustering of CML patients reveals expression patterns that are predictive of progression to blast crisis. Color represents the log ratio of the gene expression regulation.

[0016] FIG. 3 Procedures used in identifying the optimal set of discriminating genes for the purpose of monitoring the disease progression of CML patients.

[0017] FIG. 4 t-values and average log ratio for the chronic phase group (type 1) and the blast crisis group (type 2) respectively are shown for each gene. The gene index is sorted by the amplitude of t-values. Genes on the two ends of the list likely contain information about the disease progression.

[0018] FIG. 5A T-values for each gene that survived the selection criteria.

[0019] FIG. 5B Average log ratio for the chronic phase group (type 1) and the blast crisis group (type 2) respectively. The systematic difference between these two groups over the set of 366 discriminating genes allows the classification of the two groups based on gene expression patterns.

[0020] FIG. 6 The expression patterns found in the training data. Displayed in the map is the log ratio for the chronic phase group (upper part)) and the blast crisis group (lower part) respectively. The systematic difference between these two groups over this set of discriminating genes allows the classification of the two groups based on gene expression patterns.

[0021] FIG. 7 Similarity measures of each sample to the chronic phase group (Parameter 1) and to the blast crisis group (Parameter 2). Solid symbols are for training data. Open symbols are for predictions.

[0022] FIG. 8 Histogram of discriminating parameter for all samples used in training (A) and for all independent samples (B).

[0023] FIG. 9 The progression status of all bone marrow samples classified based on the gene expression patterns of 366 discriminating marker genes. Clinical information is listed to the right.

[0024] FIG. 10 The progression status of all bone marrow samples classified by support vector machine based on the gene expression patterns of 366 discriminating marker genes.

### 5. DETAILED DESCRIPTION OF THE INVENTION

### 5.1 Introduction

[0025] The invention relates to newly-discovered correlations between the expression of certain markers and chronic myclogenous leukemia (CML). A set of genetic markers has been determined, the expression of which correlates with the existence of CML. More specifically, the invention provides for set of genetic markers that can distinguish chronic phase from blast phase Methods are provided for use of these markers to distinguish between these patient groups, and to determine general courses of treatment. Microchip oligonucleotide arrays comprising these markers are also provided, as well as methods of constructing such microarrays.

### 5.2 Definitions

[0026] As used herein, “Marker-derived polynucleotides” means the RNA transcribed from a marker gene, any cDNA or cRNA produced therefrom, and any nucleic acid derived therefrom, such as synthetic nucleic acid having a sequence derived from the gene corresponding to the marker gene.

### 5.3 Markers Useful in Diagnosis Progression of CML

### 5.3.1 Marker Sets

[0027] The invention provides a set of 366 genetic markers correlated with the existence of CML by clustering analysis. A subset of these markers identified as useful for diagnosis of CML progression is listed in Table 1 (SEQ ID NOS: 1-366). The invention also provides a method of using these markers to distinguish chronic phase from blast phase samples.

TABLE 1
366 gene markers that distinguish blast phase from
chronic stage CML.

| | |
|---|---|
| X15414 | SEQ ID NO 1 |
| U89436 | SEQ ID NO 2 |
| D87459 | SEQ ID NO 3 |
| Y10275 | SEQ ID NO 4 |
| AF027299 | SEQ ID NO 5 |
| M34079 | SEQ ID NO 6 |
| AF054840 | SEQ ID NO 7 |
| Al671741 | SEQ ID NO 8 |
| M72709 | SEQ ID NO 9 |
| D38549 | SEQ ID NO 10 |
| T99512 | SEQ ID NO 11 |
| Y00433 | SEQ ID NO 12 |
| L31801 | SEQ ID NO 13 |
| AF043045 | SEQ ID NO 14 |
| X75252 | SEQ ID NO 15 |
| X53793 | SEQ ID NO 16 |
| M14505 | SEQ ID NO 17 |
| Al557064 | SEQ ID NO 18 |
| J04794 | SEQ ID NO 19 |
| M24194 | SEQ ID NO 20 |
| X17620 | SEQ ID NO 21 |
| X73460 | SEQ ID NO 22 |
| X92720 | SEQ ID NO 23 |
| M58458 | SEQ ID NO 24 |
| Al358246 | SEQ ID NO 25 |
| X76538 | SEQ ID NO 26 |
| Y12065 | SEQ ID NO 27 |
| U28946 | SEQ ID NO 28 |
| H23562 | SEQ ID NO 29 |
| X67951 | SEQ ID NO 30 |
| X62744 | SEQ ID NO 31 |
| M36981 | SEQ ID NO 32 |
| N30076 | SEQ ID NO 33 |
| D45248 | SEQ ID NO 34 |
| AA448663 | SEQ ID NO 35 |
| AB015907 | SEQ ID NO 36 |
| X06994 | SEQ ID NO 37 |
| AA987540 | SEQ ID NO 38 |
| X85545 | SEQ ID NO 39 |
| J04031 | SEQ ID NO 40 |
| AA142859 | SEQ ID NO 41 |
| U20536 | SEQ ID NO 42 |
| X95632 | SEQ ID NO 43 |
| AB007917 | SEQ ID NO 44 |
| D21851 | SEQ ID NO 45 |
| M31523 | SEQ ID NO 46 |
| X02994 | SEQ ID NO 47 |
| J03592 | SEQ ID NO 48 |
| D21262 | SEQ ID NO 49 |
| AF070735 | SEQ ID NO 50 |
| U54778 | SEQ ID NO 51 |
| AF030424 | SEQ ID NO 52 |
| M94065 | SEQ ID NO 53 |
| X52142 | SEQ ID NO 54 |
| M69039 | SEQ ID NO 55 |
| X74801 | SEQ ID NO 56 |
| D43948 | SEQ ID NO 57 |
| M23619 | SEQ ID NO 58 |
| AJ223948 | SEQ ID NO 59 |
| A1214598 | SEQ ID NO 60 |
| J04991 | SEQ ID NO 61 |
| AL691084 | SEQ ID NO 62 |
| AB011124 | SEQ ID NO 63 |
| AA669106 | SEQ ID NO 64 |
| U09086 | SEQ ID NO 65 |
| AL535884 | SEQ ID NO 66 |
| D42054 | SEQ ID NO 67 |
| N32858 | SEQ ID NO 68 |
| S43127 | SEQ ID NO 69 |
| AB020637 | SEQ ID NO 70 |
| AF029893 | SEQ ID NO 71 |
| U43374 | SEQ ID NO 72 |
| AL472106 | SEQ ID NO 73 |
| D42043 | SEQ ID NO 74 |
| M34181 | SEQ ID NO 75 |
| X06323 | SEQ ID NO 76 |
| AJ006291 | SEQ ID NO 77 |
| U03911 | SEQ ID NO 78 |
| Al374994 | SEQ ID NO 79 |
| D84276 | SEQ ID NO 80 |
| X70683 | SEQ ID NO 81 |
| AB014540 | SEQ ID NO 82 |
| AB002330 | SEQ ID NO 83 |
| U32519 | SEQ ID NO 84 |
| D86956 | SEQ ID NO 85 |
| AF001601 | SEQ ID NO 86 |
| Al379662 | SEQ ID NO 87 |
| Al669720 | SEQ ID NO 88 |
| AA142949 | SEQ ID NO 89 |
| U43185 | SEQ ID NO 90 |
| AF008442 | SEQ ID NO 91 |
| Al275895 | SEQ ID NO 92 |
| D90224 | SEQ ID NO 93 |
| U59919 | SEQ ID NO 94 |
| M94856 | SEQ ID NO 95 |
| M83822 | SEQ ID NO 96 |
| X74330 | SEQ ID NO 97 |
| M32578 | SEQ ID NO 98 |
| F040105 | SEQ ID NO 99 |
| U53003 | SEQ ID NO 100 |
| Al253387 | SEQ ID NO 101 |
| Z11692 | SEQ ID NO 102 |
| S73885 | SEQ ID NO 103 |
| X07696 | SEQ ID NO 104 |
| J02984 | SEQ ID NO 105 |
| X87176 | SEQ ID NO 106 |
| M16279 | SEQ ID NO 107 |
| J04208 | SEQ ID NO 108 |
| U79291 | SEQ ID NO 109 |
| Al346190 | SEQ ID NO 110 |
| Al188445 | SEQ ID NO 111 |
| L38961 | SEQ ID NO 112 |
| Al096643 | SEQ ID NO 113 |
| X94453 | SEQ ID NO 114 |
| AB018290 | SEQ ID NO 115 |
| Al681442 | SEQ ID NO 116 |
| X63526 | SEQ ID NO 117 |
| M13450 | SEQ ID NO 118 |
| M61831 | SEQ ID NO 119 |
| M33680 | SEQ ID NO 120 |
| D13639 | SEQ ID NO 121 |
| Al690834 | SEQ ID NO 122 |
| L13278 | SEQ ID NO 123 |
| J03473 | SEQ ID NO 124 |
| D84294 | SEQ ID NO 125 |
| U50939 | SEQ ID NO 126 |
| AF035284 | SEQ ID NO 127 |
| AA843160 | SEQ ID NO 128 |
| L13689 | SEQ ID NO 129 |
| M34480 | SEQ ID NO 130 |
| Al283385 | SEQ ID NO 131 |
| X63657 | SEQ ID NO 132 |
| AA678185 | SEQ ID NO 133 |
| X64229 | SEQ ID NO 134 |
| AF037989 | SEQ ID NO 135 |
| M25753 | SEQ ID NO 136 |
| D38553 | SEQ ID NO 137 |
| Al022085 | SEQ ID NO 138 |
| Al186910 | SEQ ID NO 139 |
| X68060 | SEQ ID NO 140 |
| X70394 | SEQ ID NO 141 |
| Al634838 | SEQ ID NO 142 |
| S78187 | SEQ ID NO 143 |
| Al654133 | SEQ ID NO 144 |
| J02940 | SEQ ID NO 145 |
| Al671161 | SEQ ID NO 146 |
| R55307 | SEQ ID NO 147 |
| AA121546 | SEQ ID NO 148 |
| J03040 | SEQ ID NO 149 |
| AB002352 | SEQ ID NO 150 |
| X65644 | SEQ ID NO 151 |
| U04953 | SEQ ID NO 152 |
| U10323 | SEQ ID NO 153 |
| Al126840 | SEQ ID NO 154 |
| Al697151 | SEQ ID NO 155 |
| U94703 | SEQ ID NO 156 |
| M64571 | SEQ ID NO 157 |
| AB002371 | SEQ ID NO 158 |
| U38847 | SEQ ID NO 159 |
| AB014523 | SEQ ID NO 160 |
| D79988 | SEQ ID NO 161 |
| X82200 | SEQ ID NO 162 |
| X89984 | SEQ ID NO 163 |
| L07555 | SEQ ID NO 164 |
| AF037364 | SEQ ID NO 165 |
| U00947 | SEQ ID NO 166 |
| AA402892 | SEQ ID NO 167 |
| AB011166 | SEQ ID NO 168 |
| Al701109 | SEQ ID NO 169 |
| U41060 | SEQ ID NO 170 |
| AF026293 | SEQ ID NO 171 |
| AF041037 | SEQ ID NO 172 |
| U76421 | SEQ ID NO 173 |
| Z11793 | SEQ ID NO 174 |
| X77794 | SEQ ID NO 175 |
| J00194 | SEQ ID NO 176 |
| J04615 | SEQ ID NO 177 |
| U97105 | SEQ ID NO 178 |
| AF061016 | SEQ ID NO 179 |
| AB006624 | SEQ ID NO 180 |
| U50196 | SEQ ID NO 181 |
| D83777 | SEQ ID NO 182 |
| U75362 | SEQ ID NO 183 |
| D26350 | SEQ ID NO 184 |
| M98343 | SEQ ID NO 185 |
| Al151265 | SEQ ID NO 186 |
| M14745 | SEQ ID NO 187 |
| D50406 | SEQ ID NO 188 |
| Al279820 | SEQ ID NO 189 |
| M57730 | SEQ ID NO 190 |
| U30521 | SEQ ID NO 191 |
| R45293 | SEQ ID NO 192 |
| AF042282 | SEQ ID NO 193 |
| U65410 | SEQ ID NO 194 |
| J04164 | SEQ ID NO 195 |
| AA700158 | SEQ ID NO 196 |
| AF054589 | SEQ ID NO 197 |
| U55206 | SEQ ID NO 198 |
| AF006484 | SEQ ID NO 199 |
| AF062495 | SEQ ID NO 200 |
| U25770 | SEQ ID NO 201 |
| AA829653 | SEQ ID N0 202 |
| D42055 | SEQ ID NO 203 |
| M58459 | SEQ ID NO 204 |
| AA878385 | SEQ ID NO 205 |
| Al191557 | SEQ ID NO 206 |
| AB011004 | SEQ ID NO 207 |
| U92715 | SEQ ID NO 208 |
| L10373 | SEQ ID NO 209 |
| X92814 | SEQ ID NO 210 |
| N39247 | SEQ ID NO 211 |
| AF039022 | SEQ ID NO 212 |
| AB020662 | SEQ ID NO 213 |
| AF009615 | SEQ ID NO 214 |
| AF038953 | SEQ ID NO 215 |
| Al660656 | SEQ ID NO 216 |
| AA192175 | SEQ ID NO 217 |
| M19507 | SEQ ID NO 218 |
| Al142357 | SEQ ID NO 219 |
| AA921856 | SEQ ID NO 220 |
| Al051327 | SEQ ID NO 221 |
| AF006259 | SEQ ID NO 222 |
| D86864 | SEQ ID NO 223 |
| X69804 | SEQ ID NO 224 |
| X82240 | SEQ ID NO 225 |
| X04217 | SEQ ID NO 226 |
| Al357189 | SEQ ID NO 227 |
| S57235 | SEQ ID NO 228 |
| AA926854 | SEQ ID NO 229 |
| L01406 | SEQ ID NO 230 |
| R45298 | SEQ ID NO 231 |
| Y09397 | SEQ ID NO 232 |
| Al336937 | SEQ ID NO 233 |
| U22526 | SEQ ID NO 234 |
| AF088868 | SEQ ID NO 235 |
| AB008913 | SEQ ID NO 236 |
| AB011421 | SEQ ID NO 237 |
| Al005063 | SEQ ID NO 238 |
| J04130 | SEQ ID NO 239 |
| R56094 | SEQ ID NO 240 |
| Al243123 | SEQ ID NO 241 |
| AF091073 | SEQ ID NO 242 |
| U47414 | SEQ ID NO 243 |
| Al650643 | SEQ ID NO 244 |
| Al356773 | SEQ ID NO 245 |
| R39960 | SEQ ID NO 246 |
| AF070587 | SEQ ID NO 247 |
| M17017 | SEQ ID NO 248 |
| AB020663 | SEQ ID NO 249 |
| Al262941 | SEQ ID NO 250 |
| Al262981 | SEQ ID NO 251 |
| AA906175 | SEQ ID NO 252 |
| X75918 | SEQ ID NO 253 |
| AA868968 | SEQ ID NO 254 |
| Al679625 | SEQ ID NO 255 |
| U68019 | SEQ ID NO 256 |
| X04011 | SEQ ID NO 257 |
| X69111 | SEQ ID NO 258 |
| AF097021 | SEQ ID NO 259 |
| AF044288 | SEQ ID NO 260 |
| W84421 | SEQ ID NO 261 |
| U69559 | SEQ ID NO 262 |
| X52195 | SEQ ID NO 263 |
| AF013263 | SEQ ID NO 264 |
| AB014578 | SEQ ID NO 265 |
| Y08136 | SEQ ID NO 266 |
| AF070569 | SEQ ID NO 267 |
| AB018339 | SEQ ID NO 268 |
| U90916 | SEQ ID NO 269 |
| X95239 | SEQ ID NO 270 |
| AF052107 | SEQ ID NO 271 |
| Al656059 | SEQ ID NO 272 |
| A1457525 | SEQ ID NO 273 |
| D86959 | SEQ ID NO 274 |
| D80012 | SEQ ID NO 275 |
| X91249 | SEQ ID NO 276 |
| AF039067 | SEQ ID NO 277 |
| N38966 | SEQ ID NO 278 |
| J05068 | SEQ ID NO 279 |
| AB005047 | SEQ ID NO 280 |
| Z29331 | SEQ ID NO 281 |
| Al479332 | SEQ ID NO 282 |
| Al151509 | SEQ ID NO 283 |
| D86985 | SEQ ID NO 284 |
| L05515 | SEQ ID NO 285 |
| N66072 | SEQ ID NO 286 |
| N57538 | SEQ ID NO 287 |
| Y10313 | SEQ ID NO 288 |
| D10040 | SEQ ID NO 289 |
| AA993127 | SEQ ID NO 290 |
| X89214 | SEQ ID NO 291 |
| AF098642 | SEQ ID NO 292 |
| AF023611 | SEQ ID NO 293 |
| N39237 | SEQ ID NO 294 |
| AB011085 | SEQ ID NO 295 |
| Al223310 | SEQ ID NO 296 |
| AA620747 | SEQ ID NO 297 |
| AF079221 | SEQ ID NO 298 |
| X76061 | SEQ ID NO 299 |
| Al306503 | SEQ ID NO 300 |
| Al268420 | SEQ ID NO 301 |
| Al201868 | SEQ ID NO 302 |
| D87930 | SEQ ID NO 303 |
| AF017995 | SEQ ID NO 304 |
| Y00285 | SEQ ID NO 305 |
| AB014511 | SEQ ID NO 3O6 |
| AF052169 | SEQ ID NO 307 |
| Al344106 | SEQ ID NO 308 |
| Al693930 | SEQ ID NO 309 |
| AA972712 | SEQ ID NO 310 |
| M64673 | SEQ ID NO 311 |
| X90846 | SEQ ID NO 312 |
| L33930 | SEQ ID NO 313 |
| Al052820 | SEQ ID NO 314 |
| Al439194 | SEQ ID NO 315 |
| U31525 | SEQ ID NO 316 |
| AF045459 | SEQ ID NO 317 |
| AA176867 | SEQ ID NO 318 |
| M95767 | SEQ ID NO 319 |
| X58794 | SEQ ID NO 320 |
| Al352299 | SEQ ID NO 321 |
| X54150 | SEQ ID NO 322 |
| AB014536 | SEQ ID NO 323 |
| A1470098 | SEQ ID NO 324 |
| U07139 | SEQ ID NO 325 |
| U08471 | SEQ ID NO 326 |
| AF077346 | SEQ ID NO 327 |
| AB020686 | SEQ ID NO 328 |
| D50840 | SEQ ID NO 329 |
| Al651772 | SEQ ID NO 330 |
| U36336 | SEQ ID NO 331 |
| Al435586 | SEQ ID NO 332 |
| U66672 | SEQ ID NO 333 |
| AF085199 | SEQ ID NO 334 |
| AA485939 | SEQ ID NO 335 |
| AA709067 | SEQ ID NO 336 |
| U67615 | SEQ ID NO 337 |
| X71125 | SEQ ID NO 338 |
| X69910 | SEQ ID NO 339 |
| AF051850 | SEQ ID NO 340 |
| X16354 | SEQ ID NO 341 |
| R59187 | SEQ ID NO 342 |
| J05070 | SEQ ID NO 343 |
| Al354439 | SEQ ID NO 344 |
| D86960 | SEQ ID NO 345 |
| AF034373 | SEQ ID NO 346 |
| AB007918 | SEQ ID NO 347 |
| A1381472 | SEQ ID NO 348 |
| T66135 | SEQ ID NO 349 |
| Al079292 | SEQ ID NO 350 |
| Al091230 | SEQ ID NO 351 |
| Y07759 | SEQ ID NO 352 |
| U79298 | SEQ ID NO 353 |
| AF001434 | SEQ ID NO 354 |
| X89478 | SEQ ID NO 355 |
| AA988547 | SEQ ID NO 356 |
| Al393246 | SEQ ID NO 357 |
| AA961586 | SEQ ID NO 358 |
| H29746 | SEQ ID NO 359 |
| Al493593 | SEQ ID NO 360 |
| D38305 | SEQ ID NO 361 |
| Al378555 | SEQ ID NO 362 |
| Al205344 | SEQ ID NO 363 |
| AA868506 | SEQ ID NO 364 |
| Al673085 | SEQ ID NO 365 |
| U33053 | SEQ ID NO 366 |

[0028] In one embodiment, the invention provides a set of 366 gene markers that can classify CML patients as having blast crisis CML (BC-CML) or chronic phase CML (CP-CML). In this respect, the invention provides 366 gene markers able to distinguish whether a patient has progressed from chronic phase to blast crisis. The invention further provides subsets of at least 50, 100, 150, 200, 250 or 300 genetic markers, drawn from the set of 366 markers, which also distinguish blast crisis from chronic phase. The invention also provides a method of using these markers to distinguish between BC-CML and CP-CML patients or cells derived therefrom.

[0029] Any of the gene markers provided above may be used alone or with other CML markers, or with markers for other phenotypes or conditions. For example, markers that distinguish CML status may be used in conjunction with those for breast cancer.

### 5.3.2 Identification of Markers

[0030] The present invention provides sets of markers for the differentiation of CP-CML samples from BC-CML samples. Generally, the marker sets were identified by determining which of ˜25,000 human markers had expression patters that correlated with the conditions or indications.

[0031] In one embodiment, the method for identifying marker sets is as follows. After extraction and labeling of target polynucleotides, the expression of all markers (genes) in a sample is compared to the expression of all markers in a standard or control. The sample may comprise a single sample, or a pool of samples; the samples in the pool may come from different individuals. In one embodiment, the standard or control comprises target polynucleotide molecules derived from a sample from a normal individual (i.e., an individual not afflicted with CML). In a preferred embodiment, the standard or control is a pool of target polynucleotide molecules. The pool may derived from collected samples from a number of normal individuals. In a preferred embodiment, the control pool comprises bone marrow samples taken from a number of individuals having CP-CML. In another preferred embodiment, the pool comprises an artificially-generated population of nucleic acids designed to approximate the level of nucleic acid derived from each marker found in a pool of marker-derived nucleic acids derived from tumor samples.

[0032] The comparison may be accomplished by any means known in the art. For example, expression levels of various markers may be assessed by separation of target polynucleotide molecules (e.g., RNA or cDNA) derived from the markers in agarose or polyacrylamide gels, followed by hybridization with marker-specific oligonucleotide probes. Alternatively, the comparison may be accomplished by the labeling of target polynucleotide molecules followed by separation on a sequencing gel. Polynucleotide samples are placed on the gel such that patient and control or standard polynucleotides are in adjacent lanes. Comparison of expression levels is accomplished visually or by means of densitometer. In a preferred embodiment, the expression of all markers is assessed simultaneously by hybridization to an oligonucleotide microarray. In each approach, markers meeting certain criteria are identified as associated with CML.

[0033] A marker is selected based upon a significant difference of expression in a sample as compared to a standard or control condition. Selection may be made based upon either significant up- or down regulation of the marker in the patient sample. Selection may also be made by calculation of the statistical significance (i.e., the p-value) of the correlation between the expression of the marker and the condition or indication. Preferably, both selection criteria are used. Thus, in one embodiment of the present invention, markers associated with CML are selected where the markers show both more than two-fold change (increase or decrease) in expression as compared to a standard, and the p-value for the correlation between CML and the change in marker expression is no more than 0.01 (i.e., is statistically significant).

[0034] The expression of the identified CML-related markers is then used to identify markers that can differentiate tumors into clinical types. In a specific embodiment using a number of tumor samples, markers are identified by calculation of correlation coefficients between the clinical category and the linear, logarithmic or other transform of expression ratio across all samples for each individual gene. Specifically, the correlation coefficient can be calculated as

ρ=(\vec{c}•\vec{r})/(∥\vec{c}∥·∥\vec{r}∥),

[0035] where C represents the category and r represents the linear, logarithmic or any other transform of ratio of expression between sample and control. Markers for which the coefficient of correlation exceeds an arbitrary cutoff are identified as CML-related markers specific for a particular clinical type. In a specific embodiment, markers are chosen if the correlation coefficient is greater than about 0.3 or less than about −0.3.

[0036] Next, the significance of the correlation is calculated. This significance may be calculated by any statistical means by which such significance is calculated. In a specific example, a set of correlation data is generated using a Monte-Carlo technique to randomize the association between the expression difference of a particular marker an the clinical category. The frequency distribution of markers satisfying the criteria through calculation of correlation coefficients is compared to the number of markers satisfying the criteria in the data generated through the Monte-Carlo technique. The frequency distribution of markers satisfying the criteria in the Monte-Carlo runs is used to determine whether the number of markers selected by correlation with clinical data is significant. See Example 2.

[0037] Once a marker set is identified, the markers may be rank-ordered in order of significance of discrimination. One means of rank ordering is by the amplitude of correlation between the change in gene expression of the marker and the specific condition being discriminated. Another, preferred means is to use a statistical metric. In a specific embodiment, the metric is a Fisher-like statistic:

$$t = \frac{( ⟨ {x}_{1} ⟩ - ⟨ {x}_{2} ⟩ )}{\sqrt{[ {σ}_{1}^{2} ( {n}_{1} - 1 ) + {σ}_{2}^{2} ( {n}_{1} - 1 ) ] / ( {n}_{1} + {n}_{2} - 2 ) / ( 1 / {n}_{1} + 1 / {n}_{2} )}}$$

[0038] In this equation, (x₁) is the error-weighted average of the log ratio of transcript expression measurements within the total number of samples, (x₂) is the error-weighted average of log ratio within a first diagnostic group (e.g., BC-CMV), σ₁ is the variance of the log ratio within the total number of samples and n₁ is the number of samples for which valid measurements of log ratios are available. σ₂ is the variance of log ratio within a second, related diagnostic group (e.g., CP-CML), and n₂ is the number of samples for which valid measurements of log ratios are available. The t-value in the above equation represents the variance-compensated difference between two means.

[0039] The rank-ordered marker set may be used to optimize the number of markers in the set used for discrimination. This is accomplished generally in a “leave one out” method as follows. In a first run, a subset, for example 5, of the markers is used to generate a template, where out of X samples, X-1 are used to generate the template, and the status of the remaining sample is predicted. In a second run, additional markers, for example 5, area added, so that a template is now generated from 10 markers, and the outcome of the remaining sample is predicted. this process is repeated until the entire set of markers is used to generate the template. For each of the runs, type 1 (false negative) and type 2 (false positive) errors are calculated; the optimal number of markers is that number where the type 1 error rate, type 2 error rate, or, preferably, the total error rate is lowest.

### 5.3.3 Sample Collection

[0040] In the present invention, target polynucleotide molecules are extracted from a bone marrow sample taken from an individual afflicted with CML. The sample may be collected in any clinically acceptable manner, but must be collected such that marker-derived polynucleotides (i.e., RNA) are preserved. These polynucleotide molecules are preferably labeled distinguishably from standard or control polynucleotide molecules, and both are hybridized to a microarray comprising some or all of the markers or marker sets or subsets described above. A sample may comprise any clinically relevant tissue sample, such as a bone marrow sample, tumor biopsy, fine needle aspirate, or a sample of bodily fluid, such as blood, plasma, serum, lymph, ascitic fluid, cystic fluid or urine. The sample may be taken from a human, or, in a veterinary context, from non-human animals such as ruminants, horses, swine or sheep, or from domestic companion animals such as felines and canines.

[0041] Methods for preparing total and poly(A)+RNA are well known and are described generally in Sambrook et al. (1989, Molecular Cloning—A Laboratory Manual (2nd Ed.), Vols. 1-3, Cold Spring Harbor Laboratory, Cold Spring Harbor, N.Y.) and Ausubel et al., eds. (1994, Current Protocols in Molecular Biology, vol.2, Current Protocols Publishing, New York).

[0042] RNA may be isolated from eukaryotic cells by procedures that involve lysis of the cells and denaturation of the proteins contained therein. Cells of interest include wild-type cells (i.e., non-cancerous), drug-exposed wild-type cells, tumor- or tumor-derived cells, modified cells, normal or tumor cell line cells, and drug-exposed modified cells.

[0043] Additional steps may be employed to remove DNA. Cell lysis may be accomplished with a nonionic detergent, followed by microcentrifugation to remove the nuclei and hence the bulk of the cellular DNA. In one embodiment, RNA is extracted from cells of the various types of interest using guanidinium thiocyanate lysis followed by CsCl centrifugation to separate the RNA from DNA (Chirgwin et al., 1979, Biochemistry 18:5294-5299). Poly(A)+RNA is selected by selection with oligo-dT cellulose (see Sambrook et al., 1989, Molecular Cloning—A Laboratory Manual (2nd Ed.), Vols. 1-3, Cold Spring Harbor Laboratory, Cold Spring Harbor, N.Y.). Alternatively, separation of RNA from DNA can be accomplished by organic extraction, for example, with hot phenol or phenol/chloroform/isoamyl alcohol.

[0044] If desired, RNase inhibitors may be added to the lysis buffer. Likewise, for certain cell types, it may be desirable to add a protein denaturation/digestion step to the protocol.

[0045] For many applications, it is desirable to preferentially enrich mRNA with respect to other cellular RNAs, such as transfer RNA (tRNA) and ribosomal RNA (rRNA). Most mRNAs contain a poly(A) tail at their 3′ end. This allows them to be enriched by affinity chromatography, for example, using oligo(dT) or poly(U) coupled to a solid support, such as cellulose or Sephadex™ (see Ausubel et al., eds., 1994, Current Protocols in Molecular Biology, vol. 2, Current Protocols Publishing, New York). Once bound, poly(A)+mRNA is eluted from the affinity column using 2 mM EDTA/0.1% SDS.

[0046] The sample of RNA can comprise a plurality of different mRNA molecules, each different mRNA molecule having a different nucleotide sequence. In a specific embodiment, the mRNA molecules in the RNA sample comprise at least 100 different nucleotide sequences.

[0047] In a specific embodiment, total RNA or mRNA from cells are used in the methods of the invention. The source of the RNA can be cells of a plant or animal, human, mammal, primate, non-human animal, dog, cat, mouse, rat, bird, yeast, eukaryote, prokaryote, etc. In specific embodiments, the method of the invention is used with a sample containing total mRNA or total RNA from 1×10⁶ cells or less.

### 5.4 Methods of Using CML Marker Sets

### 5.4.1 Diagnostic Methods

[0048] The present invention provides for methods of using the marker sets to analyze a sample from an individual so as to determine whether the individual is afflicted with CP-CML or BC-CML. The individual need not, however, actually be afflicted with CML. Essentially, the expression of specific marker genes in the individual, or a sample taken therefrom, is compared to a standard or control. For example, assume two CML-related conditions, X and Y. One can compare the level of expression of CML markers for condition X in an individual to the level of the marker-derived polynucleotides in a control, wherein the level represents the level of expression exhibited by samples having condition X. In this instance, if the expression of the markers in the individual's sample is substantially (i.e., statistically) different from that of the control, then the individual does not have condition X. Where, as here, the choice is bimodal (i.e., a sample is either X or Y), the individual can additionally be said to have condition Y. Of course, the comparison to a control representing condition Y can also be performed. Preferably both are performed simultaneously, such that each control acts as both a positive and a negative control. The distinguishing result may thus either be a demonstrable difference from the expression levels (i.e., the amount of marker-derived RNA, or polynucleotides derived therefrom) represented by the control, or no significant difference.

[0049] Thus, in one embodiment, the method of determining a particular tumor-related status of an individual comprises the steps of (1) hybridizing labeled target polynucleotides from an individual to a microarray containing one of the above marker sets; (2) hybridizing standard or control polynucleotides molecules to the microarray, wherein the standard or control molecules are differentially labeled from the target molecules; and (3) determining the difference in transcript levels, or lack thereof, between the target and standard or control, wherein the difference, or lack thereof, determines the individual's CML-related status. In a more specific embodiment, the standard or control molecules comprise marker-derived polynucleotides from a pool of samples from normal individuals, or, preferably, a pool of samples from individuals having blast crisis CML. In another preferred embodiment, the standard or control is an artificially-generated pool of marker-derived polynucleotides, which pool is designed to mimic the level of marker expression exhibited by clinical samples of normal or CML tumor tissue having a particular clinical indication (i. e., CP-CML or BC-CML). In another specific embodiment, the control molecules comprise a pool derived from CML-derived cancer cell lines.

[0050] The present invention provides sets of markers useful for distinguishing CP-CML from BC-CML samples. Thus, in one embodiment of the above method, the level of polynucleotides (i.e., mRNA or polynucleotides derived therefrom) in a sample from an individual, expressed from the markers provided in Table 1, are compared to the level of expression of the same markers from a control, wherein the control comprises marker-related polynucleotides derived from chronic phase samples, blast crisis samples, or both. Preferably, the comparison is to both blast crisis samples and chronic phase samples, and preferably the comparison is to polynucleotide pools from a number of CP-CML and BP-CML samples, respectively. Where the individual's marker expression most closely resembles or correlates with the CP-CML control, and does not resemble or correlate with the BP-CML control, the individual is classified as having CML in the chronic phase.

[0051] For the above embodiment of the method, the full set of markers may be used (i.e., the complete set of 366 markers listed in Table 1). In other embodiments, subsets of the markers may be used. for example, the subset of markers used may comprise at least 5, 10, 20, 50, 100, 250, or 300 of the marker genes listed in Table 3.

[0052] The similarity between the marker expression profile of an individual and that of a control can be assessed a number of ways. In the simplest case, the profiles can be compared visually in a printout of expression difference data. Alternatively, the similarity can be calculated mathematically.

[0053] In one embodiment, the similarity measure between two patients x and y, or between patient x and a classifier y, can be calculated using the following equation:

$$S = 1 - [ {\sum }_{t = 1}^{{N}_{v}} \frac{( {x}_{t} - \overline{x} )}{{σ}_{{x}_{t}}} \frac{( {y}_{t} - \overline{y} )}{{σ}_{{y}_{i}}} / \sqrt{{\sum }_{t = 1}^{{N}_{v}} {( \frac{( {x}_{i} - \overline{x} )}{{σ}_{{x}_{t}}} )}^{2} {\sum }_{t = 1}^{{N}_{v}} {( \frac{( {y}_{i} - \overline{y} )}{{σ}_{{y}_{i}}} )}^{2}} ] .$$

[0054] In this equation, x and y are two patients with components of log ratio xᵢ and yᵢ, i=1, . . . , N=4,986. Associated with every value xᵢ is error σₓ_{ᵢ}. The smaller the value σₓ_{ᵢ}, the more reliable the measurement

$${x}_{t} \cdot \overline{x} = {\sum }_{i = 1}^{{N}_{v}} \frac{{x}_{t}}{{σ}_{{x}_{t}}^{2}} / {\sum }_{i = 1}^{{N}_{v}} \frac{1}{{σ}_{{x}_{t}}^{2}}$$

[0055] is the error-weighted arithmetic mean.

[0056] In a preferred embodiment, templates are developed for sample comparison. The template is defined as the error-weighted log ratio average of the expression difference for the group of marker genes able to differentiate the particular CML-related condition (i.e, progression from chronic phase to blast crisis). For example, templates are defined for CP-CML samples and for BC-CML samples. Next, a classifier parameter is calculated. This parameter may be calculated using either expression level differences between the sample and template, or by calculation of a correlation coefficient. Such a coefficient, Pi, can be calculated using the following equation:

Pᵢ=(\vec{z}ᵢ•\vec{y})/(∥\vec{z}ᵢ∥·∥\vec{y}∥),

[0057] where zᵢ is the expression template i, and y is the expression profile of a patient.

[0058] Thus, in a more specific embodiment, the above method of determining a particular tumor-related status of an individual comprises the steps of (1) hybridizing labeled target polynucleotides from an individual to a microarray containing one of the above marker sets; (2) hybridizing standard or control polynucleotides molecules to the microarray, wherein the standard or control molecules are differentially labeled from the target molecules; and (3) determining the difference in transcript levels, or lack thereof, between the target and standard or control, wherein the control is a template comprising the error-weighted log ratio average of the markers, wherein said determining is accomplished by means of the statistic of Equation 1 or Equation 4, and wherein the difference, or lack thereof, determines the individual's tumor-related status.

### 5.5 Determination of Marker Gene Expression Levels

### 5.5.1 Methods

[0059] The expression levels of the marker genes in a sample maybe determined by any means known in the art. The expression level may be determined by isolating and determining the level (i.e., amount) of nucleic acid transcribed from each marker gene. Alternatively, or additionally, the level of specific proteins translated from mRNA transcribed from a marker gene may be determined.

[0060] The level of expression of specific marker genes can be accomplished by determining the amount of mRNA, or polynucleotides derived therefrom, present in a sample. Any method for determining RNA levels can be used. For example, RNA is isolated from a sample and separated on an agarose gel. The separated RNA is then transferred to a solid support, such as a filter. Nucleic acid probes representing one or more markers are then hybridized to the filter by northern hybridization, and the amount of marker-derived RNA is determined. Such determination can be visual, or machine-aided, for example, by use of a densitometer. Another method of determining RNA levels is by use of a dot-blot or a slot-blot. In this method, RNA, or nucleic acid derived therefrom, from a sample is labeled. The RNA or nucleic acid derived therefrom is then hybridized to a filter containing oligonucleotides derived from one or more marker genes, wherein the oligonucleotides are placed upon the filter at discrete, easily-identifiable locations. Hybridization, or lack thereof, of the labeled RNA to the filter-bound oligonucleotides is determined visually or by densitometer. Polynucleotides can be labeled using a radiolabel or a fluorescent (i.e., visible) label.

[0061] These examples are not intended to be limiting; other methods of determining RNA abundance are known in the art.

[0062] The level of expression of particular marker genes may also be assessed by determining the level of the specific protein expressed from the marker genes. This can be accomplished, for example, by separation of proteins from a sample on a polyacrylamide gel, followed by identification of specific marker-derived proteins using antibodies in a western blot. Alternatively, proteins can be separated by two-dimensional gel electrophoresis systems. Two-dimensional gel electrophoresis is well-known in the art and typically involves isoelectric focusing along a first dimension followed by SDS-PAGE electrophoresis along a second dimension. See, e.g., Hames et al., 1990, Gel Electrophoresis of Proteins: A Practical Approach, IRL Press, New York; Shevchenko et al., 1996, Proc. Nat'l Acad. Sci. USA 93:1440-1445; Sagliocco et al., 1996, Yeast 12:1519-1533; Lander, 1996, Science 274:536-539. The resulting electropherograms can be analyzed by numerous techniques, including mass spectrometric techniques, western blotting and immunoblot analysis using polyclonal and monoclonal antibodies.

[0063] Alternatively, marker-derived protein levels can be determined by constructing an antibody microarray in which binding sites comprise immobilized, preferably monoclonal, antibodies specific to a plurality of protein species encoded by the cell genome. Preferably, antibodies are present for a substantial fraction of the marker-derived proteins of interest. Methods for making monoclonal antibodies are well known (see, e.g., Harlow and Lane, 1988, Antibodies: A Laboratory Manual, Cold Spring Harbor, New York, which is incorporated in its entirety for all purposes). In a preferred embodiment, monoclonal antibodies are raised against synthetic peptide fragments designed based on genomic sequence of the cell. With such an antibody array, proteins from the cell are contacted to the array, and their binding is assayed with assays known in the art. Generally, the expression, and the level of expression, of proteins of diagnostic or prognostic interest can be detected through immunohistochemical staining of tissue slices or sections.

[0064] Finally, expression of marker genes in a number of tissue specimens may be characterized using a “tissue array” (Kononen et al., Nat Med 4(7):844-7 (1998)). In a tissue array, multiple tissue samples are assessed on the same microarray. the arrays allow in situ detection of RNA and protein levels; consecutive sections allow the analysis of multiple samples simultaneously.

### 5.5.2 Microarrays

[0065] In preferred embodiments, the methods described herein utilize the markers placed on an oligonucleotide array so that the expression status of each of the markers above is assessed simultaneously. Thus, the invention provides for oligonucleotide arrays comprising each of the marker sets described above (i.e., markers to distinguish CP-CML from BC-CML).

[0066] The microarrays provided by the present invention may comprise probes to markers able to distinguish the status of the clinical conditions noted above. In particular, the invention provides oligonucleotide arrays comprising probes to a subset or subsets of at least 5, 10, 25, 50, 100, 200, 300 gene markers, up to the full set of 366 markers, which distinguish CP-CML and BC-CML patients or samples.

[0067] General methods pertaining to the construction of microarrays comprising the marker sets and/or subsets above are described in the following sections.

### 5.5.2.1 Cosntruction of Microarrays

[0068] Microarrays are prepared by selecting probes which comprise a polynucleotide sequence, and then immobilizing such probes to a solid support or surface. For example, the probes may comprise DNA sequences, RNA sequences, or copolymer sequences of DNA and RNA. The polynucleotide sequences of the probes may also comprise DNA and/or RNA analogues, or combinations thereof. For example, the polynucleotide sequences of the probes may be full or partial fragments of genomic DNA. The polynucleotide sequences of the probes may also be synthesized nucleotide sequences, such as synthetic oligonucleotide sequences. The probe sequences can be synthesized either enzymatically in vivo, enzymatically in vitro (e.g., by PCR), or non-enzymatically in vitro.

[0069] The probe or probes used in the methods of the invention are preferably immobilized to a solid support which may be either porous or non-porous. For example, the probes of the invention may be polynucleotide sequences which are attached to a nitrocellulose or nylon membrane or filter covalently at either the 3′ or the 5′ end of the polynucleotide. Such hybridization probes are well known in the art (see, e.g., Sambrook et al., Eds., 1989, Molecular Cloning: A Laboratory Manual, 2nd ed., Vol. 1-3, Cold Spring Harbor Laboratory, Cold Spring Harbor, N.Y.). Alternatively, the solid support or surface may be a glass or plastic surface. In a particularly preferred embodiment, hybridization levels are measured to microarrays of probes consisting of a solid phase on the surface of which are immobilized a population of polynucleotides, such as a population of DNA or DNA mimics, or, alternatively, a population of RNA or RNA mimics. The solid phase may be a nonporous or, optionally, a porous material such as a gel.

[0070] In preferred embodiments, a microarray comprises a support or surface with an ordered array of binding (e.g., hybridization) sites or “probes” each representing one of the markers described herein. Preferably the microarrays are addressable arrays, and more preferably positionally addressable arrays. More specifically, each probe of the array is preferably located at a known, predetermined position on the solid support such that the identity (i.e., the sequence) of each probe can be determined from its position in the array (i.e., on the support or surface). In preferred embodiments, each probe is covalently attached to the solid support at a single site.

[0071] Microarrays can be made in a number of ways, of which several are described below. However produced, microarrays share certain characteristics. The arrays are reproducible, allowing multiple copies of a given array to be produced and easily compared with each other. Preferably, microarrays are made from materials that are stable under binding (e.g., nucleic acid hybridization) conditions. The microarrays are preferably small, e.g., between 1 cm² and 25 cm², between 12 cm² and 13 cm², or 3 cm². However, larger arrays are also contemplated and may be preferable, e.g., for use in screening arrays. Preferably, a given binding site or unique set of binding sites in the microarray will specifically bind (e.g., hybridize) to the product of a single gene in a cell (e.g., to a specific mRNA, or to a specific cDNA derived therefrom). However, in general, other related or similar sequences will cross hybridize to a given binding site.

[0072] The microarrays of the present invention include one or more test probes, each of which has a polynucleotide sequence that is complementary to a subsequence of RNA or DNA to be detected. Preferably, the position of each probe on the solid surface is known. Indeed, the microarrays are preferably positionally addressable arrays. Specifically, each probe of the array is preferably located at a known, predetermined position on the solid support such that the identity (i.e., the sequence) of each probe can be determined from its position on the array (i.e., on the support or surface).

[0073] According to the invention, the microarray is an array (i.e., a matrix) in which each position represents one of the markers described herein. For example, each position can contain a DNA or DNA analogue based on genomic DNA to which a particular RNA or cDNA transcribed from that genetic marker can specifically hybridize. The DNA or DNA analogue can be, e.g., a synthetic oligomer or a gene fragment. In one embodiment, probes representing each of the markers is present on the array. In a preferred embodiment, the array comprises at least 5 of the CML gene markers.

### 5.5.2.2 Preparing Probes For Microarrays

[0074] As noted above, the “probe” to which a particular polynucleotide molecule specifically hybridizes according to the invention contains a complementary genomic polynucleotide sequence. The probes of the exon profiling array preferably consist of nucleotide sequences of no more than 1,000 nucleotides. In some embodiments, the probes of the exon profiling array consist of nucleotide sequences of 10 to 1,000 nucleotides. In a preferred embodiment, the nucleotide sequences of the probes are in the range of 10-200 nucleotides in length and are genomic sequences of a species of organism, such that a plurality of different probes is present, with sequences complementary and thus capable of hybridizing to the genome of such a species of organism, sequentially tiled across all or a portion of such genome. In other specific embodiments, the probes are in the range of 10-30 nucleotides in length, in the range of 10-40 nucleotides in length, in the range of 20-50 nucleotides in length, in the range of 40-80 nucleotides in length, in the range of 50-150 nucleotides in length, in the range of 80-120 nucleotides in length, and most preferably are 60 nucleotides in length.

[0075] The probes may comprise DNA or DNA “mimics” (e.g., derivatives and analogues) corresponding to a portion of an organism's genome. In another embodiment, the probes of the microarray are complementary RNA or RNA mimics. DNA mimics are polymers composed of subunits capable of specific, Watson-Crick-like hybridization with DNA, or of specific hybridization with RNA. The nucleic acids can be modified at the base moiety, at the sugar moiety, or at the phosphate backbone. Exemplary DNA mimics include, e.g., phosphorothioates.

[0076] DNA can be obtained, e.g., by polymerase chain reaction (PCR) amplification of genomic DNA or cloned sequences. PCR primers are preferably chosen based on a known sequence of the genome that will result in amplification of specific fragments of genomic DNA. Computer programs that are well known in the art are useful in the design of primers with the required specificity and optimal amplification properties, such as Oligo version 5.0 (National Biosciences). Typically each probe on the microarray will be between 10 bases and 50,000 bases, usually between 300 bases and 1,000 bases in length. PCR methods are well known in the art, and are described, for example, in Innis et al., eds., 1990, PCR Protocols: A Guide to Methods and Applications, Academic Press Inc., San Diego, Calif. It will be apparent to one skilled in the art that controlled robotic systems are useful for isolating and amplifying nucleic acids.

[0077] An alternative, preferred means for generating the polynucleotide probes of the microarray is by synthesis of synthetic polynucleotides or oligonucleotides, e.g., using N-phosphonate or phosphoramidite chemistries (Froehler et al., 1986, Nucleic Acid Res. 14:5399-5407; McBride et al., 1983, Tetrahedron Lett. 24:246-248). Synthetic sequences are typically between about 10 and about 500 bases in length, more typically between about 20 and about 100 bases, and most preferably between about 40 and about 70 bases in length. In some embodiments, synthetic nucleic acids include non-natural bases, such as, but by no means limited to, inosine. As noted above, nucleic acid analogues may be used as binding sites for hybridization. An example of a suitable nucleic acid analogue is peptide nucleic acid (see, e.g., Egholm et al., 1993, Nature 363:566-568; U.S. Pat. No. 5,539,083).

[0078] Probes are preferably selected using an algorithm that takes into account binding energies, base composition, sequence complexity, cross-hybridization binding energies, and secondary structure (see Friend et al., International Patent Publication WO 01/05935, published Jan. 25, 2001).

[0079] A skilled artisan will also appreciate that positive control probes, e.g., probes known to be complementary and hybridizable to sequences in the target polynucleotide molecules, and negative control probes, e.g., probes known to not be complementary and hybridizable to sequences in the target polynucleotide molecules, should be included on the array. In one embodiment, positive controls are synthesized along the perimeter of the array. In another embodiment, positive controls are synthesized in diagonal stripes across the array. In still another embodiment, the reverse complement for each probe is synthesized next to the position of the probe to serve as a negative control. In yet another embodiment, sequences from other species of organism are used as negative controls or as “spike-in” controls.

### 5.5.2.3 Attaching Probes to the Solid Surface

[0080] The probes are attached to a solid support or surface, which may be made, e.g., from glass, plastic (e.g., polypropylene, nylon), polyacrylamide, nitrocellulose, gel, or other porous or nonporous material. A preferred method for attaching the nucleic acids to a surface is by printing on glass plates, as is described generally by Schena et al., 1995, Science 270:467-470. This method is especially useful for preparing microarrays of cDNA (See also, DeRisi et al., 1996, Nature Genetics 14:457-460; Shalon et al., 1996, Genome Res. 6:639-645; and Schena et al., 1995, Proc. Natl. Acad. Sci. U.S.A. 93:10539-11286).

[0081] A second preferred method for making microarrays is by making high-density oligonucleotide arrays. Techniques are known for producing arrays containing thousands of oligonucleotides complementary to defined sequences, at defined locations on a surface using photolithographic techniques for synthesis in situ (see, Fodor et al., 1991, Science 251:767-773; Pease et al., 1994, Proc. Natl. Acad. Sci. U.S.A. 91:5022-5026; Lockhart et al., 1996, Nature Biotechnology 14:1675; U.S. Pat. Nos. 5,578,832; 5,556,752; and 5,510,270) or other methods for rapid synthesis and deposition of defined oligonucleotides (Blanchard et al., Biosensors & Bioelectronics 11:687-690). When these methods are used, oligonucleotides (e.g., 60-mers) of known sequence are synthesized directly on a surface such as a derivatized glass slide. Usually, the array produced is redundant, with several oligonucleotide molecules per RNA.

[0082] Other methods for making microarrays, e.g., by masking (Maskos and Southern, 1992, Nuc. Acids. Res. 20:1679-1684), may also be used. In principle, and as noted supra, any type of array, for example, dot blots on a nylon hybridization membrane (see Sambrook et al., supra) could be used. However, as will be recognized by those skilled in the art, very small arrays will frequently be preferred because hybridization volumes will be smaller.

[0083] In one embodiment, the arrays of the present invention are prepared by synthesizing polynucleotide probes on a support. In such an embodiment, polynucleotide probes are attached to the support covalently at either the 3′ or the 5′ end of the polynucleotide.

[0084] In a particularly preferred embodiment, microarrays of the invention are manufactured by means of an ink jet printing device for oligonucleotide synthesis, e.g., using the methods and systems described by Blanchard in U.S. Pat. No.6,028,189; Blanchard et al., 1996, Biosensors and Bioelectronics 11:687-690; Blanchard, 1998, in Synthetic DNA Arrays in Genetic Engineering, Vol.20, J. K. Setlow, Ed., Plenum Press, New York at pages 111-123. Specifically, the oligonucleotide probes in such microarrays are preferably synthesized in arrays, e.g., on a glass slide, by serially depositing individual nucleotide bases in “microdroplets” of a high surface tension solvent such as propylene carbonate. The microdroplets have small volumes (e.g., 100 pL or less, more preferably 50 pL or less) and are separated from each other on the microarray (e.g., by hydrophobic domains) to form circular surface tension wells which define the locations of the array elements (i.e., the different probes). Microarrays manufactured by this ink-jet method are typically of high density, preferably having a density of at least about 2,500 different probes per 1 cm². The polynucleotide probes are attached to the support covalently at either the 3′ or the 5′ end of the polynucleotide.

### 5.5.2.4 Target Polynucleotide Molecules

[0085] The polynucleotide molecules which may be analyzed by the present invention (the “target polynucleotide molecules”) may be from any clinically relevant source, but are expressed RNA or a nucleic acid derived therefrom (e.g., cDNA or amplified RNA derived from cDNA that incorporates an RNA polymerase promoter), including naturally occurring nucleic acid molecules, as well as synthetic nucleic acid molecules. In one embodiment, the target polynucleotide molecules comprise RNA, including, but by no means limited to, total cellular RNA, poly(A)⁺ messenger RNA (mRNA) or fraction thereof, cytoplasmic mRNA, or RNA transcribed from cDNA (i.e., cRNA; see, e.g., Linsley & Schelter, U.S. patent application Ser. No. 09/411,074, filed Oct. 4, 1999, or U.S. Pat. Nos. 5,545,522, 5,891,636, or 5,716,785). Methods for preparing total and poly(A)⁺ RNA are well known in the art, and are described generally, e.g., in Sambrook et al., supra. In one embodiment, RNA is extracted from cells of the various types of interest in this invention using guanidinium thiocyanate lysis followed by CsCl centrifugation (Chirgwin et al., 1979, Biochemistry 18:5294-5299). In another embodiment, total RNA is extracted using a silica gel-based column, commercially available examples of which include RNeasy (Qiagen, Valencia, Calif.) and StrataPrep (Stratagene, La Jolla, Calif.). In an alternative embodiment, which is preferred for S. cerevisiae, RNA is extracted from cells using phenol and chloroform, as described in Ausubel et al., (Ausubel et al., eds., 1989, Current Protocols in Molecular Biology, Vol III, Green Publishing Associates, Inc., John Wiley & Sons, Inc., New York, at pp. 13.12.1-13.12.5). Poly(A)⁺ RNA can be selected, e.g., by selection with oligo-dT cellulose or, alternatively, by oligo-dT primed reverse transcription of total cellular RNA. In one embodiment, RNA can be fragmented by methods known in the art, e.g., by incubation with ZnCl₂, to generate fragments of RNA. In another embodiment, the polynucleotide molecules analyzed by the invention comprise cDNA, or PCR products of amplified RNA or cDNA.

[0086] In one embodiment, total RNA, mRNA, or nucleic acids derived therefrom, from a sample taken from a person afflicted with CML. Target polynucleotide molecules that are poorly expressed in particular cells may be enriched using normalization techniques (Bonaldo et al., 1996, Genome Res. 6:791-806).

[0087] As described above, the target polynucleotides are detectably labeled at one or more nucleotides. Any method known in the art may be used to detectably label the target polynucleotides. Preferably, this labeling incorporates the label uniformly along the length of the RNA, and more preferably, the labeling is carried out at a high degree of efficiency. One embodiment for this labeling uses oligo-dT primed reverse transcription to incorporate the label; however, conventional methods of this method are biased toward generating 3′ end fragments. Thus, in a preferred embodiment, random primers (e.g., 9-mers) are used in reverse transcription to uniformly incorporate labeled nucleotides over the full length of the target polynucleotides. Alternatively, random primers may be used in conjunction with PCR methods or T7 promoter-based in vitro transcription methods in order to amplify the target polynucleotides.

[0088] In a preferred embodiment, the detectable label is a luminescent label. For example, fluorescent labels, bio-luminescent labels, chemi-luminescent labels, and colorimetric labels may be used in the present invention. In a highly preferred embodiment, the label is a fluorescent label, such as a fluorescein, a phosphor, a rhodamine, or a polymethine dye derivative. Examples of commercially available fluorescent labels include, for example, fluorescent phosphoramidites such as FluorePrime (Amersham Pharmacia, Piscataway, N.J.), Fluoredite (Millipore, Bedford, Mass.), FAM (ABI, Foster City, Calif.), and Cy3 or Cy5 (Amersham Pharmacia, Piscataway, N.J.). In another embodiment, the detectable label is a radiolabeled nucleotide.

[0089] In a further preferred embodiment, target polynucleotide molecules from a patient sample are labeled differentially from target polynucleotide molecules of a standard. The standard can comprise target polynucleotide molecules from normal individuals (i.e., those not afflicted with CML). In a highly preferred embodiment, the standard comprises target polynucleotide molecules pooled from samples from normal individuals or cell samples from individuals exhibiting chronic phase CML. In another embodiment, the target polynucleotide molecules are derived from the same individual, but are taken at different time points, and thus indicate the efficacy of a treatment by a change in expression of the markers, or lack thereof, during and after the course of treatment (i.e., chemotherapy, radiation therapy or cryotherapy), wherein a change in the expression of the markers from a blast crisis pattern to a chronic phase pattern indicates that the treatment is efficacious. In this embodiment, different timepoints are differentially labeled.

### 5.5.2.5 Hybridization to Microarrays

[0090] Nucleic acid hybridization and wash conditions are chosen so that the target polynucleotide molecules specifically bind or specifically hybridize to the complementary polynucleotide sequences of the array, preferably to a specific array site, wherein its complementary DNA is located.

[0091] Arrays containing double-stranded probe DNA situated thereon are preferably subjected to denaturing conditions to render the DNA single-stranded prior to contacting with the target polynucleotide molecules. Arrays containing single-stranded probe DNA (e.g., synthetic oligodeoxyribonucleic acids) may need to be denatured prior to contacting with the target polynucleotide molecules, e.g., to remove hairpins or dimers which form due to self complementary sequences.

[0092] Optimal hybridization conditions will depend on the length (e.g., oligomer versus polynucleotide greater than 200 bases) and type (e.g., RNA, or DNA) of probe and target nucleic acids. One of skill in the art will appreciate that as the oligonucleotides become shorter, it may become necessary to adjust their length to achieve a relatively uniform melting temperature for satisfactory hybridization results. General parameters for specific (i.e., stringent) hybridization conditions for nucleic acids are described in Sambrook et al., (supra), and in Ausubel et al., 1987, Current Protocols in Molecular Biology, Greene Publishing and Wiley-Interscience, New York. Typical hybridization conditions for the cDNA microarrays of Schena et al., are hybridization in 5×SSC plus 0.2% SDS at 65° C. for four hours, followed by washes at 25° C. in low stringency wash buffer (1×SSC plus 0.2% SDS), followed by 10 minutes at 25° C. in higher stringency wash buffer (0.1×SSC plus 0.2% SDS) (Shena et al., 1996, Proc. Natl. Acad. Sci. U.S.A. 93:10614). Useful hybridization conditions are also provided in, e.g., Tijessen, 1993, Hybridization With Nucleic Acid Probes, Elsevier Science Publishers B.V.; and Kricka, 1992, Nonisotopic DNA Probe Techniques, Academic Press, San Diego, Calif.

[0093] Particularly preferred hybridization conditions include hybridization at a temperature at or near the mean melting temperature of the probes (e.g., within 5° C., more preferably within 2° C.) in 1 M NaCl, 50 mM MES buffer (pH 6.5),0.5% sodium sarcosine and 30% formamide.

### 5.5.2.6 Signal Detection and Data Analysis

[0094] When fluorescently labeled probes are used, the fluorescence emissions at each site of a microarray may be, preferably, detected by scanning confocal laser microscopy. In one embodiment, a separate scan, using the appropriate excitation line, is carried out for each of the two fluorophores used. Alternatively, a laser may be used that allows simultaneous specimen illumination at wavelengths specific to the two fluorophores and emissions from the two fluorophores can be analyzed simultaneously (see Shalon et al., 1996, A DNA microarray system for analyzing complex DNA samples using two-color fluorescent probe hybridization, Genome Research 6:639-645, which is incorporated by reference in its entirety for all purposes). In a preferred embodiment, the arrays are scanned with a laser fluorescent scanner with a computer controlled X-Y stage and a microscope objective. Sequential excitation of the two fluorophores is achieved with a multi-line, mixed gas laser and the emitted light is split by wavelength and detected with two photomultiplier tubes. Fluorescence laser scanning devices are described in Schena et al., 1996, Genome Res. 6:639-645 and in other references cited herein. Alternatively, the fiber-optic bundle described by Ferguson et al., 1996, Nature Biotech. 14:1681-1684, may be used to monitor mRNA abundance levels at a large number of sites simultaneously.

[0095] Signals are recorded and, in a preferred embodiment, analyzed by computer, e.g., using a 12 bit analog to digital board. In one embodiment the scanned image is despeckled using a graphics program (e.g., Hijaak Graphics Suite) and then analyzed using an image gridding program that creates a spreadsheet of the average hybridization at each wavelength at each site. If necessary, an experimentally determined correction for “cross talk” (or overlap) between the channels for the two fluors may be made. For any particular hybridization site on the transcript array, a ratio of the emission of the two fluorophores can be calculated. The ratio is independent of the absolute expression level of the cognate gene, but is useful for genes whose expression is significantly modulated in association with the different CML-related condition.

### 5.6 Computer-Facilitated Analysis

[0096] The present invention further provides for kits comprising the marker sets above. In a preferred embodiment, the kit contains a microarray ready for hybridization to target polynucleotide molecules, plus software for the data analyses described above.

[0097] The analytic methods described in the previous sections can be implemented by use of the following computer systems and according to the following programs and methods. A Computer system comprises internal components linked to external components. The internal components of a typical computer system include a processor element interconnected with a main memory. For example, the computer system can be an Intel 8086-,80386-,80486-, Pentium™, or Pentium™-based processor with preferably 32 MB or more of main memory.

[0098] The external components may include mass storage. This mass storage can be one or more hard disks (which are typically packaged together with the processor and memory). Such hard disks are preferably of 1 GB or greater storage capacity. Other external components include a user interface device, which can be a monitor, together with an inputting device, which can be a mouse, or other graphic input devices, and/or a keyboard. A printing device can also be attached to the computer.

[0099] Typically, a computer system is also linked to network link, which can be part of an Ethernet link to other local computer systems, remote computer systems, or wide area communication networks, such as the Internet. This network link allows the computer system to share data and processing tasks with other computer systems.

[0100] Loaded into memory during operation of this system are several software components, which are both standard in the art and special to the instant invention. These software components collectively cause the computer system to function according to the methods of this invention. These software components are typically stored on the mass storage device. A software component comprises the operating system, which is responsible for managing computer system and its network interconnections. This operating system can be, for example, of the Microsoft Windows® family, such as Windows 3.1, Windows 95, Windows 98, Windows 2000 or Windows NT. The software component represents common languages and functions conveniently present on this system to assist programs implementing the methods specific to this invention. Many high or low level computer languages can be used to program the analytic methods of this invention. Instructions can be interpreted during run-time or compiled. Preferred languages include C/C++, FORTRAN and JAVA. Most preferably, the methods of this invention are programmed in mathematical software packages that allow symbolic entry of equations and high-level specification of processing, including algorithms to be used, thereby freeing a user of the need to procedurally program individual equations or algorithms. Such packages include Matlab from Mathworks (Natick, Mass.), Mathematica® from Wolfram Research (Champaign, Ill.), or S-Plus® from Math Soft (Cambridge, Mass.). Specifically, the software component includes the analytic methods of the invention as programmed in a procedural language or symbolic package.

[0101] The software to be included with the kit comprises the data analysis methods of the invention as disclosed herein. In particular, the software may include mathematical routines for marker discovery, including the calculation of correlation coefficients between clinical categories (i.e., ER status) and marker expression. The software may also include mathematical routines for calculating the correlation between sample marker expression and control marker expression, using array-generated fluorescence data, to determine the clinical classification of a sample.

[0102] In an exemplary implementation, to practice the methods of the present invention, a user first loads experimental data into the computer system. These data can be directly entered by the user from a monitor, keyboard, or from other computer systems linked by a network connection, or on removable storage media such as a CD-ROM, floppy disk (not illustrated), tape drive (not illustrated), ZIP® drive (not illustrated) or through the network. Next the user causes execution of expression profile analysis software which performs the methods of the present invention.

[0103] In another exemplary implementation, a user first loads experimental data and/or databases into the computer system. This data is loaded into the memory from the storage media or from a remote computer, preferably from a dynamic geneset database system, through the network. Next the user causes execution of software that performs the steps of the present invention.

[0104] Alternative computer systems and software for implementing the analytic methods of this invention will be apparent to one of skill in the art and are intended to be comprehended within the accompanying claims. In particular, the accompanying claims are intended to include the alternative program structures for implementing the methods of this invention that will be readily apparent to one of skill in the art.

### 1. EXAMPLES

[0105] Materials and Methods

[0106] Two analytical methods were used in the present study. The first one involves the examination of the gene expression patterns from all samples by unsupervised clustering to identify the dominant classes. The second one concentrates on the identification of a set of marker genes for the CML progression and the progression classification of samples based on the set of marker genes.

[0107] 1. Sample Collection

[0108] Nineteen cases of chronic phase (n=12) and blast crisis (n=7) CML were randomly selected from archival samples obtained from patients seen at the Fred Hutchinson Cancer Research Center. Status of disease was based on morphology, flow cytometry, cytogenetics, and clinical history. The ages of the patients selected ranged from 30-50 years of age.

[0109] 2. Amplification, Labeling, and Hybridization

[0110] As shown in FIG. 1, total RNA was extracted from fresh bone marrow cells of CML patients by using RNeasy columns (Qiagen). 3′-end cDNA was synthesized by an adaptation of the protocol of Zhao et al., (see, Biotechniques 24:842-852 (1998)). To prevent transcript detection biases stemming from unequal amplification of certain sequences during PCR, the amount of input RNA was increased to 3mg and the number of PCR cycles was decreased to 10. To allow further sequence amplification by cRNA synthesis, a T7RNAP promoter sequence was added to the 3′-end primer sequence used during PCR. Following PCR, amplified DNA was isolated by phenol/chloroform extraction and then transcribed into cRNA by T7RNAP in an in vitro transcription (IVT) reaction (MegaScript, Ambion). cRNA was labeled with Cy3 or Cy5 dyes using a two-step process. First, allylamine-derivitized nucleotides were enzymatically incorporated into cRNA products. For cRNA labeling, a 3:1 mixture of 5-(3-Aminoallyl)uridine 5′-triphosphate (Sigma) and UTP was substituted for UTP in the IVT reaction. Allylamine-derivitized cRNA products were then reacted with N-hydroxy succinimide esters of Cy3 or Cy5 (CyDye, Amersham Pharmacia Biotech). 5 μg Cy5-labeled cRNA from CML patient were mixed with the same amount of Cy3-labeled product from the pool of equal amount of cRNA from each chronic phase CML patient. Hybridizations were done in duplicate with fluor reversals. Before hybridization, labeled cRNAs were fragmented to an average size of ˜50-100 nt by heating at 60° C. in the presence of 10 mM ZnCl₂. Fragmented cRNAs were added to hybridization buffer containing 1 M NaCl, 0.5% sodium sarcosine and 50 mM MES, pH 6.5, which stringency was regulated by the addition of formamide to a final concentration of 30%. Hybridizations were carried out in a final volume of 3 mls at 40° C. on a rotating platform in a hybridization oven (Robbins Scientific). After hybridization, slides were washed and scanned using a confocal laser scanner (Agilent Technologies). Fluorescence intensities on scanned images were quantified, normalized and corrected (see, Hughes at al., 2001, Nature Biotechnology 19:342-347)

[0111] 3. Pooling of Samples

[0112] The reference cRNA pool was formed by pooling equal amount of cRNAs from each chronic phase CML patient. There were cRNAs from 12 patients in this pool.

[0113] 4. 25 k Human Microarray

[0114] Surface-bound oligo nucleotides were synthesized essentially as proposed by Blanchard et al., (see, e.g., Blanchard, International Patent Publication WO 89/41531, published Sep. 24, 1998; Blanchard et al., 1996, Biosensors and Bioelectronics 11:687-690; Blanchard, 1998, in Synthetic DNA Arrays in Genetic Engineering, Vol. 20, J. K. Setlow, Ed., Plenum Press, New York at pages 111-123). Hydrophobic glass surfaces (3 inches by 3 inches) containing exposed hydroxyl groups and used as substrates for nucleotide synthesis. Phosphoramidite monomers were delivered to computer-defined positions on the glass surfaces using ink-jet printer heads. Unreacted monomers were then washed away and the ends of the extended oligonucleotides were deprotected. This cycle of monomer coupling, washing and deprotection was repeated for each desired layer of nucleotide synthesis. Oligonucleotide sequences to be printed were specified by computer files.

[0115] Hu25K microarrays represented the ˜25,000 oligonucleotides were used for this study. Sequences for microarrays were selected from the longest messenger RNA (mRNA) sequences representing UniGene clusters (Release 111, Apr. 15, 1999) (available on the Internet at ncbi.nlm.nih.gov/UniGene/). Each mRNA or EST contig was represented on Hu25K microarray by a single 60 mer oligonucleotide chosen by oligo probe design program.

### Example 1

### Identification of Markers Associated with Chronic Myeloid Leukemia

[0116] Of ˜25,000 sequences represented on the microarray, a group of 245 genes that were significantly regulated between the BC patients and the CP patients were selected based on the BC pool vs CP pool profile. A gene is determined to be a significant gene if it was differentially regulated with the p-value of differential regulation significance less than 0.001 either upwards or downwards in this BC pool vs CP pool experiment.

[0117] An unsupervised clustering algorithm allowed us to cluster patients based on their similarities measured over this set of 245 significant genes. The similarity measure between two patients x and y is defined as

$$S = 1 - [ {\sum }_{i = 1}^{{N}_{v}} \frac{( {x}_{i} - \overline{x} )}{{σ}_{{x}_{t}}} \frac{( {y}_{i} - \overline{y} )}{{σ}_{{y}_{t}}} / \sqrt{{\sum }_{i = 1}^{{N}_{v}} {( \frac{( {x}_{i} - \overline{x} )}{{σ}_{{x}_{i}}} )}^{2} {\sum }_{i = 1}^{{N}_{v}} {( \frac{( {y}_{i} - \overline{y} )}{{σ}_{{y}_{t}}} )}^{2}} ] \qquad ( 1 )$$

[0118] In Equation (1), x and y are two patients with components of log ratio xᵢ and yᵢ, i=1, . . . , N=4,986. Associated with every value xᵢ is error σₓ_{ᵢ}. The smaller the value σₓ_{ᵢ}, the more reliable the measurement.

$${x}_{t} \cdot \overline{x} = {\sum }_{i = 1}^{{N}_{v}} \frac{{x}_{t}}{{σ}_{{x}_{t}}^{2}} / {\sum }_{i = 1}^{{N}_{v}} \frac{1}{{σ}_{{x}_{t}}^{2}}$$

[0119] is the error-weighted arithmetic mean. The use of correlation as similarity metric emphasizes the importance of co-regulation in clustering rather than the amplitude of regulations.

[0120] The set of 245 genes can also be clustered based on their similarities measured over the group of 20 experiments. The similarity measure between two genes is defined in the same way as in Equation (1) except that now for each gene, there are 20 components of log ratio measurements.

[0121] The result of such a two-dimensional clustering is displayed in FIG. 2. Two distinctive patterns are remarkably noticeable in FIG. 2. The first one consists of a group of 8 experiments in the lower part of the plot whose regulations are not very different from the pool made of patients in chronic phase. The other pattern consists of a group of 12 experiments in the upper part of the plot whose expression are substantially different from the pool made of patients in chronic phase. These dominant patterns suggest that the samples can be unambiguously divided into two distinct types based on this set of 245 significant genes. Indeed, 8 samples in the first group are found to be from chronic phase patients. It was also found that 6 samples in the second group are those from blast crisis patients and 6 samples are those clinically known as chronic phase. Our analysis has revealed one case that was classified as morphologically defined chronic phase, more closely resembles blast crisis rather than chronic phase. This patient tended to have other laboratory data suggestive of progression.

[0122] From FIG. 2, it was concluded that gene expression patterns can be used to classify CML samples into subgroups of progression as we expected. Supervised statistical methods were then used to identify a set of marker genes which in turn could be used to assess the CML progression.

### Example 2

### Identification of Genetic Markers Expressed in the Progression From Chronic Phase to Blast Crisis in CML

[0123] 1. Selection of Candidate Discriminating Genes

[0124] The procedure for marker discovery is outlined in FIG. 3. In the first step, a set of candidate discriminating genes was identified based on gene expression data of training samples. Six patients in the BC group and 8 patients in the CP group were used for training. Specifically, a metric similar to “Fisher” statistic was calculated:

$$t = \frac{( ⟨ {x}_{1} ⟩ - ⟨ {x}_{2} ⟩ )}{\sqrt{[ {σ}_{1}^{2} ( {n}_{1} - 1 ) + {σ}_{2}^{2} ( {n}_{1} - 1 ) ] / ( {n}_{1} + {n}_{2} - 1 ) / ( 1 / {n}_{1} + 1 / {n}_{2} )}} \qquad ( 2 )$$

[0125] In Equation (2), (x₁) is the error-weighted average of log ratio within the “CP” group and (x₂) is the error-weighted average of log ratio within the “BC” group. σ₁ is the variance of log ratio within the “CP” group and n₁ is the number of samples that we had valid measurements of log ratios. σ₂ is the variance of log ratio within the “BC” group and n₂ is the number of samples that we had valid measurements of log ratios. t-value in Equation (2) presents the variance-compensated difference between two means. Results of t-value for each gene are shown in FIG. 4, together with (x₁) and (x₂).

[0126] A group of 366 discriminating genes were finally selected by applying a series of cuts to the data including log(Ratio)|>0.3, p<0.01 in at least 2 experiments and |t|>1. The confidence level of each gene in the this list was estimated with respect to a null hypothesis derived from the actual data set using the bootstrap technique. The t-value, averaged log ratio in BC group, averaged log ratio in PC group are shown for these selected genes in FIGS. 5A and 5B. From FIG. 5A, it is clear that on average the expressions of the two groups are dramatically different for the selected genes. FIG. 6 shows the behaviors of each individual sample over this set of marker genes. Table 1 lists all of these 366 marker genes, together with the available information such as their gene descriptions and their functions.

[0127] Many of marker genes that were identified have not been known previously to have associations with CML. These genes include numerous numbers of ESTs. This group of genes was ranked by confidence level or t-value in Equation (2).

[0128] 2. Classification of CML Patients Based on Marker Genes

[0129] In the second step, a set of classifier parameters was calculated for each type of training data sets based on either correlation or distance. In particular, a template for the CP group (called \vec{z}₁) was defined by using the error-weighted log ratio average of the selected group of genes. Similarly, we defined a template for the BC group (called \vec{z}₂) by using the error-weighted log ratio average of the selected group of genes. Two classifier parameters (P₁ and P₂) were defined based on either correlation or distance. P₁ measures the similarity between one sample \vec{y} and the “CP” template \vec{z} ₁ over this selected group of genes. P₂ measures the similarity between one sample \vec{y} and the BC template \vec{z}₂ over this selected group of genes. The correlation Pi is defined as:

Pᵢ=(\vec{z}ᵢ•\vec{y})/(∥\vec{z}ᵢ∥·∥\vec{y}∥) Equation (3)

[0130] FIG. 7 shows the classification results of 20 experiments in the two-dimensional space of P1 and P2 based on the 366 reporter genes. In particular, a scatter plot of the correlation of each experiment with the CP template defined above and the correlation of each patient with the BC template defined above were shown. One can also reduce the two parameters into a single parameter as shown in FIG. 8. FIG. 9 shows expression patterns associated to the CML classification.

[0131] 3. CML Progression Classification With Support Vector Machines

[0132] To test that the expression patterns found for the progression of CML patients are robust against the variation of methods and are reliable enough to apply to clinics, other supervised learning methods, such as a support vector machine, were applied to our data. FIG. 10 shows the classification results of 19 CML patients plus one CP pool vs BC pool profile obtained by applying support vector machine classifiers to the set of 366 genes.

### Example 3

### Construction of an Artificial Reference Pool

[0133] The reference pool for expression profiling in the above Examples was made by using equal amount of cRNAs from each individual patient in the sporadic group. In order to have a reliable, easy-to-made, and large amount of reference pool, a reference pool for CML diagnosis can be constructed using synthetic nucleic acid representing, or derived from, each marker gene. Expression of marker genes for individual patient sample is monitored only against the reference pool, not a pool derived from other patients.

[0134] To make the reference pool, 60-mer oligonucleotides are synthesized according to 60-mer ink-jet array probe sequence for each diagnostic/prognostic reporter genes, then double-stranded and cloned into pBluescript SK-vector (Stratagene, La Jolla, Calif.), adjacent to the T7 promoter sequence. Individual clones are isolated, and the sequences of their inserts are verified by DNA sequencing. To generate synthetic RNAs, clones are linearized with EcoRI and a T7 in vitro transcription (IVT) reaction is performed according to the MegaScript kit (Ambion, Austin, Tex.). IVT is followed by DNase treatment of the product. Synthetic RNAs are purified on RNeasy columns (Qiagen, Valencia, Calif.). These synthetic RNAs are transcribed, amplified, labeled, and mixed together to make the reference pool. The abundance of those synthetic RNAs are adjusted to approximate the abundance of the corresponding marker-derived transcripts in the real tumor pool.

### 2. REFERENCES CITED

[0135] All references cited herein are incorporated herein by reference in their entirety and for all purposes to the same extent as if each individual publication or patent or patent application was specifically and individually indicated to be incorporated by reference in its entirety for all purposes.

[0136] Many modifications and variations of the present invention can be made without departing from its spirit and scope, as will be apparent to those skilled in the art. The specific embodiments described herein are offered by way of example only, and the invention is to be limited only by the terms of the appended claims along with the full scope of equivalents to which such claims are entitled.

What is claimed is:

1. A method for classifying a cell sample as chronic phase CML (CP-CML) or blast crisis CML (BC-CML) comprising detecting a difference in the expression by said cell sample of a first plurality of genes relative to a control, said first plurality of genes consisting of at least 5 of the genes corresponding to the markers listed in Table 1.

2. The method of claim 1, wherein said plurality consists of at least 20 of the genes corresponding to the markers listed in Table 1.

3. The method of claim 1, wherein said plurality consists of at least 100 of the genes corresponding to the markers listed in Table 1.

4. The method of claim 1, wherein said plurality consists of at least 200 of the genes corresponding to the markers listed in Table 1.

5. The method of claim 1, wherein said plurality consists of each of the genes corresponding to the 366 markers listed in Table 1.

6. A method for classifying a sample as CP-CML or BC-CML by calculating the similarity between the expression of at least 20 of the markers listed in Table 1 in the sample to the expression of the same markers in a CP-CML nucleic acid pool and an BP-CML nucleic acid pool, comprising the steps of:
(a) labeling nucleic acids derived from a sample, with a first fluorophore to obtain a first pool of fluorophore-labeled nucleic acids;
(b) labeling with a second fluorophore a first pool of nucleic acids derived from two or more CP-CML samples, and a second pool of nucleic acids derived from two or more BP-CML samples:
(c) contacting said first fluorophore-labeled nucleic acid and said first pool of second fluorophore-labeled nucleic acid with said first microarray under conditions such that hybridization can occur, and contacting said first fluorophore-labeled nucleic acid and said second pool of second fluorophore-labeled nucleic acid with said second microarray under conditions such that hybridization can occur, detecting at each of a plurality of discrete loci on the first microarray a first flourescent emission signal from said first fluorophore-labeled nucleic acid and a second fluorescent emission signal from said first pool of second fluorophore-labeled genetic matter that is bound to said first microarray under said conditions, and detecting at each of the marker loci on said second microarray said first fluorescent emission signal from said first fluorophore-labeled nucleic acid and a third fluorescent emission signal from said second pool of second fluorophore-labeled nucleic acid;
(d) determining the similarity of the sample to the CP-CML and BP-CML pools by comparing said first fluorescence emission signals and said second fluorescence emission signals, and said first emission signals and said third fluorescence emission signals; and
(e) classifying the sample as CP-CML where the first fluorescence emission signals are more similar to said second fluorescence emission signals than to said third fluorescent emission signals, and classifying the sample as BC-CML where the first fluorescence emission signals are more similar to said third fluorescence emission signals than to said second fluorescent emission signals,
wherein said first microarray and said second microarray are similar to each other, exact replicas of each other, or are identical.

7. The method of claim 1, wherein said similarity is calculated by determining a first sum of the differences of expression levels for each marker between said first fluorophore-labeled nucleic acid and said first pool of second fluorophore-labeled nucleic acid, and a second sum of the differences of expression levels for each marker between said first fluorophore-labeled nucleic acid and said second pool of second fluorophore-labeled nucleic acid, wherein if said first sum is greater than said second sum, the sample is classified as CP-CML, and if said second sum is greater than said first sum, the sample is classified as BC-CML.

8. The method of claim 1, wherein said similarity is calculated by computing a first classifier parameter P₁ between an CP-CML template and the expression of said markers in said sample, and a second classifier parameter P₂ between an BC-CML template and the expression of said markers in said sample, wherein said P₁ and P₂ are calculated according to the formula:
Pᵢ=(\vec{z}ᵢ•\vec{y})/(∥\vec{z}ᵢ∥·∥\vec{y}∥),
wherein \vec{z}₁ and \vec{z}₂ are CP-CML and BC-CML templates, respectively, and are calculated by averaging said second fluorescence emission signal for each of said markers in said first pool of second fluorophore-labeled nucleic acid and said third fluorescence emission signal for each of said markers in said second pool of second fluorophore-labeled nucleic acid, respectively, and wherein \vec{y} is said first fluorescence emission signal of each of said markers in the sample to be classified as CP-CML or BC-CML, wherein the expression of the markers in the sample is similar to BC-CML if P₁<P₂, and similar to CP-CML if P₁>P₂.

9. A kit for determining the progression status of a sample, comprising at least two microarrays each comprising at least 20 of the markers listed in Table 1, and a computer system for determining the similarity of the level of nucleic acid derived from the markers listed in Table 1 in a sample to that in an CP-CML template and an BC-CML template, the computer system comprising a processor, and a memory encoding one or more programs coupled to the processor, wherein the one or more programs cause the processor to perform a method comprising computing the aggregate differences in expression of each marker between the sample and CP-CML pool and the aggregate differences in expression of each marker between the sample and BC-CML pool, or a method comprising determining the correlation of expression of the markers in the sample to the expression in the CP-CML and BC-CML pools, said correlation calculated according to Equation (3).

10. A microarray for distinguishing CP-CML from BC-CML cell samples comprising a positionally-addressable array of polynucleotide probes bound to a support, said polynucleotide probes comprising a plurality of different polynucleotide sequences, each of said nucleotide sequences comprising a sequence complementary and hybridizable to a different gene, said plurality consisting of at least 20 of the genes corresponding to the markers listed in Table 1.

11. A method for identifying the genes associated with a phenotype, comprising comparing the level of expression of a plurality of genes in a sample, the expression of which is correlated with the phenotype, to the level of expression of said plurality of genes in a first pool of nucleic acid derived from a plurality of samples, wherein said samples consist of normal individuals or individuals having a different phenotype than said sample.

12. The method of claim 11, wherein said sample is a second pool of nucleic acid, wherein said first pool and said second pool are derived from cell samples of individuals having different phenotypes.

13. The method of claim 13, wherein said first pool is derived from blast crisis CML samples, and said second pool is derived from chronic phase CML samples.

14. The method of claim “wherein said plurality of samples are from at least 2, 5, 10, 20 or 50 different individuals.

15. The method of claim 14 wherein each individual has cancer of a type selected from the group consisting of breast cancer, colon cancer, and prostate cancer.

The application's sequence listing, which the Patent Office published only in electronic form, follows.

SEQUENCE LISTING (366 sequences)

SEQ ID NO: 1 - DNA, 1367 bp, Homo sapiens
  ref <308>: DATABASE ACCESSION NUMBER: X15414
  ref <309>: DATABASE ENTRY DATE: 2001-06-18
gaaggccgcaccgtactgggcgggggtctggggagcgcagcagccatggcaagccgtctcctgctcaacaacggcgccaagatgcccatcctggggttgggtacctggaagtcccctccagggcaggtgactgaggccgtgaaggtggccattgacgtcgggtaccgccacatcgactgtgcccatgtgtaccagaatgagaatgaggtgggggtggccattcaggagaagctcagggagcaggtggtgaagcgtgaggagctcttcatcgtcagcaagctgtggtgcacgtaccatgagaagggcctggtgaaaggagcctgccagaagacactcagcgacctgaagctggactacctggacctctaccttattcactggccgactggctttaagcctgggaaggaatttttcccattggatgagtcgggcaatgtggttcccagtgacaccaacattctggacacgtgggcggccatggaagagctggtggatgaagggctggtgaaagctattggcatctccaacttcaaccatctccaggtggagatgatcttaaacaaacctggcttgaagtataagcctgcagttaaccagattgagtgccacccatatctcactcaggagaagttaatccagtactgccagtccaaaggcatcgtggtgaccgcctacagccccctcggctctcctgacaggccctgggccaagcccgaggacccttctctcctggaggatcccaggatcaaggcgatcgcagccaagcacaataaaactacagcccaggtcctgatccggttccccatgcagaggaacttggtggtgatccccaagtctgtgacaccagaacgcattgctgagaactttaaggtctttgactttgaactgagcagccaggatatgaccaccttactcagctacaacaggaactggagggtctgtgccttgttgagctgtacctcccacaaggattaccccttccatgaagagttttgaagctgtggttgcctgctcgtccccaagtgacctatacctgtgtttcttgcctcatttttttccttgcaaatgtagtatggcctgtgtcactcagcagtgggacagcaacctgtagagtggccagcgagggcgtgtctagcttgatgttggatctcaagagccctgtcagtagagtagaagtctcttccagtttgctttgcccttctttctaccctgctggggaaagtacaacctgaatacccttttctgaccaaagagaagcaaaatctaccaggtcaaaatagtgccactaacggttgagttttgactgcttggaactggaatcctttcagcaagacttctctttgcctcaaataaaaagtgcttttgtg

SEQ ID NO: 2 - DNA, 1683 bp, Homo sapiens
  ref <308>: DATABASE ACCESSION NUMBER: U89436
  ref <309>: DATABASE ENTRY DATE: 2001-06-18
atgggggacgctcccagccctgaagagaaactgcaccttatcacccggaacctgcaggaggttctgggggaagagaagctgaaggagatactgaaggagcgggaacttaaaatttactggggaacggcaaccacgggcaaaccacatgtggcttactttgtgcccatgtcaaagattgcagacttcttaaaggcagggtgtgaggtaacaattctgtttgcggacctccacgcatacctggataacatgaaagccccatgggaacttctagaactccgagtcagttactatgagaatgtgatcaaagcaatgctggagagcattggtgtgcccttggagaagctcaagttcatcaaaggcactgattaccagctcagcaaagagtacacactagatgtgtacagactctcctccgtggtcacacagcacgattccaagaaggctggagctgaggtggtaaagcaggtggagcaccctttgctgagtggcctcttataccccggactgcaggctttggatgaagagtatttaaaagtagatgcccaatttggaggcattgatcagagaaagattttcacctttgcagagaagtacctccctgcacttggctattcaaaacgggtccatctgatgaatcctatggttccaggattaacaggcagcaaaatgagctcttcagaagaggagtccaagattgatctccttgatcggaaggaggatgtgaagaaaaaactgaagaaggccttctgtgagccaggaaatgtggagaacaatggggttctgtccttcatcaagcatgtcctttttccccttaagtccgagtttgtgatcctacgagatgagaaatggggtggaaacaaaacctacacagcttacgtggacctggaaaaggactttgctgctgaggttgtacatcctggagacctgaagaattctgttgaagtcgcactgaacaagttgctggatccaatccgggaaaagtttaatacccctgccctgaaaaaactggccagcgctgcctacccagatccctcaaagcagaagccaatggccaaaggccctgccaagaattcagaaccagaggaggtcatcccatcccggctggatatccgtgtggggaaaatcatcactgtggagaagcacccagatgcagacagcctgtatgtagagaagattgacgtgggggaagctgaaccacggactgtggtgagcggcctggtacagttcgtgcccaaggaggaactgcaggacaggctggtagtggtgctgtgcaacctgaaaccccagaagatgagaggagtcgagtcccaaggcatgcttctgtgtgcttctatagaagggataaaccgccaggttgaacctctggaccctccggcaggctctgctcctggtgagcacgtgtttgtgaagggctatgaaaagggccaaccagatgaggagctcaagcccaagaagaaagtcttcgagaagttgcaggctgacttcaaaatttctgaggagtgcatcgcacagtggaagcaaaccaacttcatgaccaagctgggctccatttcctgtaaatcgctgaaaggggggaacattagctagccagcccagcatcttccccccttcttccaccactgagtcatctgctgtctcttcagtctgctccatccatcacccatttacccatctctcaggaca

SEQ ID NO: 3 - DNA, 2625 bp, Homo sapiens
  ref <308>: DATABASE ACCESSION NUMBER: D87459
  ref <309>: DATABASE ENTRY DATE: 2001-06-18
cttctcttgcacttgcggatgatgaactggaataacgatgaaagaaagcacatccgatctcaacattcacgtcctgccctataaccgattaattaattgatccccagctagactagtgttggagaaatcagcatgttaaaacaactgttgatgatagctgttggagtaaagttgcagtggaagctatggctgcaaaatcgttaaaatcttcaaggtgaactggcacaaaggttaatctcaagatgccgctagtgaaaagaaacatcgatcctaggcacttgtgccacacagcactgcctagaggcattaagaatgaactggaatgtgtaaccaatatttccttggcaaatataattagacaactaagtagcctaagtaaatatgctgaagatatatttggagaattattcaatgaagcacatagtttttccttcagagtcaactcattgcaagaacgtgtggaccgtttatctgttagtgttacacagcttgatccaaaggaagaagaattgtctttgcaagatataacaatgaggaaagctttccgaagttctacaattcaagaccagcagcttttcgatcgcaagactttgcctattccattacaggagacgtacgatgtttgtgaacagcctccacctctcaatatactcactccttatagagatgatggtaaagaaggtctgaagttttataccaatccttcgtatttctttgatctatggaaagaaaaaatgttgcaagatacagaggataagaggaaggaaaagaggaagcagaagcagaaaaatctagatcgtcctcatgaaccagaaaaagtgccaagagcacctcatgacaggcggcgagaatggcagaagctggcccaaggtccagagctggctgaagatgatgctaatctcttacataagcatattgaagttgctaatggcccagcctctcattttgaaacaagacctcagacatacgtggatcatatggatggatcttactcactttctgccttgccatttagtcagatgagtgagcttctgactagagctgaggaaagggtattagtcagaccacatgaaccacctccacctccaccaatgcatggagcaggagatgcaaaaccgatacccacctgtatcagttctgctacaggtttgatagaaaatcgccctcagtcaccagctacaggcagaacacctgtgtttgtgagccccactcccccacctcctccaccacctcttccatctgccttgtcaacttcctcattaagagcttcaatgacttcaactcctccccctccagtacctcccccacctccacctccagccactgctttgcaagctccagcagtaccaccacctccagctcctcttcagattgcccctggagttcttcacccagctcctcctccaattgcacctcctctagtacagccctctccaccagtagctagagctgccccagtatgtgagactgtaccagttcatccactcccacaaggtgaagttcaggggctgcctccacccccaccaccgcctcctctgcctccacctggcattcgaccatcatcacctgtcacagttacagctcttgctcatcctccctctgggctacatccaactccatctactgccccaggtccccatgttccattaatgcctccatctcctccatcacaagttatacctgcttctgagccaaagcgccatccatcaaccctacctgtaatcagtgatgccaggagtgtgctactggaagcaatacgaaaaggtattcagctacgcaaagtagaagagcagcgtgaacaggaagctaagcatgaacgcattgaaaacgatgttgccaccatcctgtctcgccgtattgctgttgaatatagtgattcggaagatgattcagaatttgatgaagtagattggttggagtaagaaaaatgcattgataaatattacaaaactgaatgcaaatgtcctttgtggtgcttgttccttgaaaatgtttggtcattctagtgttttgctttcttttccttataataaatgacccttttcctccataacttttgatttctaaggaaaatattagcatacatttcaaactaaatgttttacagtggcttatcttttttttccccctgaaaagactaatttggtcaaataaaccactaagtattaagcatggacagctgttgttagagtagcagattcagttttttgatatatcttaattgtgtactttgtgaattttaatttaaagaaagcaactgaaattgaaatcttgagggcagctgtatctactaatgagccttattccatttcctgatgttttaaaagaagaaacactgccttgattatacgaatacactcagaaagtacatttagcttgtagtgttgaattctcttaaaggaatgcttgaattttttcattattgttttattgtttttatatacttgccttatttgaatgtttagcagtatccccttcccacttatatattgtgtgatatgattttgcttgcctataggagttaaaaacttttccatgtgaaatactctgacttaaacatacatgtaacttacataactgttaagaataacagtctgatttaataaatggttcattttaaaagtt

SEQ ID NO: 4 - DNA, 1600 bp, Homo sapiens
  ref <308>: DATABASE ACCESSION NUMBER: Y10275
  ref <309>: DATABASE ENTRY DATE: 2001-06-18
gtccgcaggcttctgcctggccgccgccgcctataagctaccaggaggagctttacgacttcccgtcctgcgggaagtggcgggcacgatcgcaaggtagcgcagaagcttctcaatggccagcgccagctgcagccccggcggcgcactcgcctcacctgagcctgggaggaaaattcttccaaggatggtctcccactcagagctgaggaagcttttctactcagcagatgctgtgtgttttgatgttgacagcacggtcatcagagaagaaggaatcgatgagctagccaaaatctgtggcgttgaggacgcggtgtcagaaatgacacggcgagccatgggcggggcagtgcctttcaaagctgctctcacagagcgcttagccctcatccagccctccagggagcaggtgcagagactcatagcagagcaacccccacacctgacccccggcataagggagctggtaagtcgcctacaggagcgaaatgttcaggttttcctaatatctggtggctttaggagtattgtagagcatgttgcttcaaagctcaatatcccagcaaccaatgtatttgccaataggctgaaattctactttaacggtgaatatgcaggttttgatgagacgcagccaacagctgaatctggtggaaaaggaaaagtgattaaacttttaaaggaaaaatttcattttaagaaaataatcatgattggagatggtgccacagatatggaagcctgtcctcctgctgatgctttcattggatttggaggaaatgtgatcaggcaacaagtcaaggataacgccaaatggtatatcactgattttgtagagctgctgggagaactggaagaataacatccattgtcgtacagctccaaacaacttcagatgaatttttacaagttatacagattgatactgtttgcttacagttgcctattacaacttgctatagaaagttggtacaaatgatctgtactttaaactacagttaggaatcctagaagattgctttttttttttttttaactgtagttccagtattatatgatgactattgatttcctggagaggttttttttttttttgagacagaatcttgctctgttgcccaggctggagtgcagtggcgcggtctcggctcactgcaagctctgcctcccaggttcacgccattctcctgcctcagcctcccgagtagctgggactacaggcgcccgccaccacatccggctaattttttgtatttttagtagagacggggtttgaccgtgttagccaggatggtcttgatctcctgaccttgtgatccgcctgcctcagcctcccaaagtgctgggattacaggcttgggccaccgcgcccagccaatgtcctagagagttttgtgatctgaattctttatgtatatttgtagctatatttcatacaaagtgctttaagtgtggagagtcaattaaacacctttactcttagaaatacggattcggcagccttcagtgaatattggtttctctttggtatgtcaataaaagtttatccgtatgtcagaacggatttgtggaaaaaaaaaaaaaaaaaaaaaaaaaa

SEQ ID NO: 5 - DNA, 4336 bp, Homo sapiens
  ref <308>: DATABASE ACCESSION NUMBER: AF027299
  ref <309>: DATABASE ENTRY DATE: 2001-06-18
ggcgggtcccgcggcgaggcagctcctgggcataagctgtggccatgactactgaagtaggctctgtgtctgaagtgaagaaggactctagccagttaggaacagatgcaaccaaggaaaaacctaaagaagtagcagaaaatcagcagaatcagtcttccgatccagaggaggaaaaaggttcccagccacctcctgcagctgaaagccaaagtagtctacgccgccagaagagagagaaggaaacatcggagagcaggggtatttctcggttcataccgccatggcttaagaagcaaaagtcatataccttagtagtggccaaagatggaggagataaaaaagagcctacccaagctgttgttgaagaacaggtcttagataaagaggaaccccttccagaagaacagagacaggctaagggtgatgctgaagaaatggctcagaagaaacaagagattaaagttgaagtcaaggaagaaaaaccctcagtgagcaaggaagaaaaaccctcagtgagcaaagtggagatgcagcctactgaattagtaagtaaggagagagaagagaaggtaaaagaaacacaggaagacaaattagaaggaggagcagcaaaaagggagaccaaggaagtgcagaccaatgagctgaaagcagagaaggcatctcaaaaagtcaccaagaagaccaaaactgtccagtgtaaagtgaccctcttagatggcaccgaatacagctgtgacctggagaaacatgccaagggacaagtgttatttgacaaagtgtgtgaacacctcaatctcttggagaaagactactttggacttttgtttcaggaaagccctgagcagaaaaactggttagatcctgctaaagaaataaagagacaactgagaaaccttccatggctattcacttttaatgtgaagttttatcctcctgatccttctcaattgactgaagatatcaccagatacttcttgtgccttcagctccggcaggacattgcctctggccgcctgccctgctcttttgtgactcatgctctcctgggatcctacaccctgcaggctgaacttggtgactatgacccagaagaacatggcagcatcgacctcagtgaattccagtttgcccctactcagactaaggagctggaagagaaggtggcagagctgcacaaaacccacaggggcttatcgccagcacaagctgattcccagttcttagaaaatgcaaagaggctttccatgtatggtgttgacctacatcatgccaaggactcagaaggtgtggacatcaagctgggcgtgtgtgctaatggacttctcatttacaaagacagactgcgaatcaatcgttttgcttggccgaaaatcttaaaaatttcctataaacgcagtaacttctacattaaagtcagaccggcagagctggaacagtttgagagtaccattggattcaaactgccaaaccaccgggcagcgaaaagactatggaaagtgtgcgtggagcatcatactttctacaggcttgtttctccagagcagccaccaaaagccaagttcctgaccttggggtccaaatttcgctatagtggccgcacccaagcacagacccgccaggccagcaccctcatagataggccagcaccacactttgagcgcacttctagtaaacgggtctccaggagtctagatggagctccgattggtgtcatggaccaaagtcttatgaaggattttcctggcgctgctggggagatttcagcctatggacctggacttgtcagcattgccgtggtacaagatggggacggcaggagggaagtgagaagcccaactaaagccccacatttgcagctcattgaaggaaagaaaaattccttgagagtagaaggggataatatttatgtcagacatagcaatttaatgttggaggaactggataaggcccaggaggacatactgaaacatcaggctagcattagtgaactcaagcgcaattttatggaatccacacctgagccgcgccctaatgaatgggaaaaacgacgtatcacacctctgtccctacagacacaagggagttcacatgagactctgaatatagtggaggagaagaagcgggcagaggttgggaaagacgaaagagtaatcacagaagaaatgaatggtaaagagatatcacctgggagtggtcctggggagattcgtaaggtggagcctgtgacacaaaaagactccacctccctgtcttctgagagcagcagcagcagcagtgagagtgaggaggaagacgtgggagagtaccgtccccaccaccgagtgaccgagggcaccatcagggaggaacaggagtatgaagaagaggtggaggaagaaccccgcccggcagccaaggtagtagagagggaggaagcagtgcccgaagccagcccagtcacacaagcaggtgccagtgtaatcacagtagaaacagtgatccaggaaaatgtaggtgcccaaaagatacccggagagaagagtgtacacgaaggcgctcttaagcaagacatgggagaagaagcagaggaagagccacagaaagttaacggagaggtgtcccatgttgacattgatgttttgccacaaattatttgttgttcagagccaccagtggtaaaaacagagatggtaacaatttctgatgcctcacaaaggacagaaatctccaccaaggaagtccccattgtccaaactgagaccaaaaccatcacatatgagtctccacagattgatggcggggctggtggtgattcgggcacgttactgaccgcacaaaccatcacatctgagtccgtgtcaacaacgacaaccacacacatcaccaagactgtaaaaggtggaatttctgaaacaagaattgagaaacgcattgtgatcacaggagatggagatattgatcatgaccaggcactggctcaggcgatcagggaagccagagagcagcaccctgacatgtcggtcacaagagtggtggtacacaaagaaacagagttggctgaggaaggggaagattaagtaagaaagtcattttttaaacaacactcaactttgtgaacccctgaagattttttgaccgttccaagtcttaatgccacaccactattccagcgaatttatgctacaactggtaacaatgaccagaagcctgaagaattaaaatgccaacaccaaacctttccttaccagctctggtctatattgctcccatgcatttaatatattattttgttttataaccacttctaaatattctcagttctttctttttgttgttgttaattaaggggttttggttttgttttctgtttactttgtgtgcaactacctgcttttaatgactcactttgatcaaatgacagtgaacaaagccagcccaagctggtaaggtgctgttcacttgaacaggtgctgttgcgcagaaaggaaactctgtgactaatttagatagtggctttccttcttctggattcttttcattgaattctcacagtaaatatttacggagttttcaaattgcagcaaatatactgtatgagaaaatattaatacagattaaaagcctttcttacatcttgaaaattttctaatatttgagaatttcacagggatgttttttatattgggacccttttgactttccagtcctgtgactttctacttttagtagagagtcagaatctctggactggagaataatgaagaagttcactgactgtgcactgtgcttagagaccctgccgcaccacagtgccaatgcttgtcagacacatgcccttcggcagcattccagaacaggagggaagagaaagagaaaactttcttccctctactaaaagattcaggcagcttaaaaccttagtgctttctttcttaacatacccaaatttcaattctttccattatttgaacacttgggtagaactcttgctttgtattaaacctctttgtctacacatgtaaaacttaccttttgttattgagcaggcctatctctttcagatagttttatgattcacacaggtttgaggatgctggggagagggggagggggctgtggtggtgttctgttggttacaagaaagttataccatttaaagctggcaccagagacccgatagggacttattaactatattgaacattttttcctttgcctttgaccctatgtatagttacgatgccagattagatttatagcagcctcaagttgtattaaatgatattttgcttcctgtaatactattataaaataaagtttgtttattctctaaaaaaaaaaaaaaaaaaaa

SEQ ID NO: 6 - DNA, 1341 bp, Homo sapiens
  ref <308>: DATABASE ACCESSION NUMBER: M34079
  ref <309>: DATABASE ENTRY DATE: 2001-06-18
gaattccggcgaccgtgtgggatgaggccgagcaagatggaattggggaggaggtgctcaagatgtccacggaggagatcatccagcgcacacggctgctggacagtgagatcaagatcatgaagagtgaagtgttgagagtcacccatgagctccaagccatgaaggacaagataaaagagaacagtgagaaaatcaaagtgaacaagaccctgccgtaccttgtctccaacgtcatcgagctcctggatgttgatcctaatgaccaagaggaggatggtgccaatattgacctggactcccagaggaagggcaagtgtgctgtgatcaaaacctctacacgacagacgtacttccttcctgtgattgggttggtggatgctgaaaagctaaagccaggagacctggtgggtgtgaacaaagactcctatctgatcctggagacgctgcccacagagtatgactcgcgggtgaaggccatggaggtagacgagaggcccacggagcaatacagtgacattgggggtttggacaagcagatccaggagctggtggaggccattgtcttgccaatgaaccacaaggagaagtttgagaacttggggatccaacctccaaaaggggtgctgatgtatgggcccccagggacggggaagaccctcctggcccgggcctgtgccgcacagactaaggccaccttcctaaagctggctggcccccagctggtgcagatgttcattggagatggtgccaagctagtccgggatgcctttgccctggccaaggagaaagcgccctctatcatcttcattgatgagttggatgccatcggcaccaagcgctttgacagtgagaaggctggggaccgggaggtgcagaggacaatgctggagcttctgaaccagctggatggcttccagcccaacacccaagttaaggtaattgcagccacaaacagggtggacatcctggaccccgccctcctccgctcgggccgccttgaccgcaagatagagttcccgatgcccaatgaggaggcccgggccagaatcatgcagatccactcccgaaagatgaatgtcagtcctgacgtgaactacgaggagctggcccgctgcacagatgacttcaatggggcccagtgcaaggctgtgtgtgtggaggcgggcatgatcgcactggccaggggtgccacggagctcacccacgaggactacatggaaggcatcctggaggtgcaggccaagaagaaagccaacctacaatactacgcctaggcacacaggccagccccagtctcacggctgaagtgcgcaataaaagatggtttagggggaattc

SEQ ID NO: 7 - DNA, 930 bp, Homo sapiens
  ref <308>: DATABASE ACCESSION NUMBER: AF054840
  ref <309>: DATABASE ENTRY DATE: 2001-06-18
atgggccagtgcggcatcacctcctccaagaccgtgctggtctttctcaacctcatcttctggggggcagctggcattttatgctatgtgggagcctatgtcttcatcacttatgatgactatgaccacttctttgaagatgtgtacacgctcatccctgctgtagtgatcatagctgtaggagccctgcttttcatcattgggctaattggctgctgtgccacaatccgggaaagtcgctgtggacttgccacgtttgtcatcatcctgctcttggtttttgtcacagaagttgttgtagtggttttgggatatgtttacagagcaaaggtggaaaatgaggttgatcgcagcattcagaaagtgtataagacctacaatggaaccaaccctgatgctgctagccgggctattgattatgtacagagacagctgcattgttgtggaattcacaactactcagactgggaaaatacagattggttcaaagaaaccaaaaaccagagtgtccctcttagctgctgcagagagactgccagcaattgtaatggcagcctggcccacccttccgacctctatgctgaggggtgtgaggctctagttgtgaagaagctacaagaaatcatgatgcatgtgatctgggccgcactggcatttgcagctattcagctgctgggcatgctgtgtgcttgcatcgtgttgtgcagaaggagtagagatcctgcttacgagctcctcatcactggcggaacctatgcatagttgacaactcttgcctgagctttttggtcttgttctgatttggaaggtgaattgagcaggtctgctgctgttggcctctggagttcatttagttaaagcacatgtacactggtgttggacagagcagcttggcttttcatgtgcccaactacttactactactgcgat

SEQ ID NO: 8 - DNA, 575 bp, Homo sapiens
  ref <308>: DATABASE ACCESSION NUMBER: AI671741
  ref <309>: DATABASE ENTRY DATE: 2001-06-18
attggttcaatttgacgtttttcatttgatttaaaaaatgcagaaattaatatactgagtcccttttaagacagaggcctgctcgttaatgtaaaagcttggaaaagttatacaaagaacactccgaaaataaagtttttgttattaacacaaatgattttgtaagaagcaaaacattttttttcaaaagcaggatttgttctaagtctaggttcacaaaggtattcatttctataaatatcaacttaagactgtgagaaatgatgtattctttttcacacgaatatgttcaaggtaagtaactaaaaatgtacgcttttattgactaaatggaaagctggcctataatagtcaaattgatgaacattcataatgagtttttagaaatttagaattatacactcatatatatgtatatgtacatatacatacacacacacatatatctctatatacccacatacagatatatagatatatgctgcttaagacctatcaccctaaacaatcagggcaaaaaaaattcaatataaaactatataaatcaaacagatttgttcccaaaacatagcaca

SEQ ID NO: 9 - DNA, 1717 bp, Homo sapiens
  ref <308>: DATABASE ACCESSION NUMBER: M72709
  ref <309>: DATABASE ENTRY DATE: 2001-06-18
cgccgcgggagacgtggtgccgctgcgggctcgctctgccgtgcgctaggcttggtgggaaggcctgttctcgagtccgcacttttcgtcaccgccatgtcgggaggtggtgtgattcgtggccccgcagggaacaacgattgccgcatctacgtgggtaacttacctccagacatccgaaccaaggacattgaggacgtgttctacaaatacggcgctatccgcgacatcgacctcaagaatcgccgcgggggaccgcccttcgccttcgttgagttcgaggacccgcgagacgcagaggacgcggtgtatggtcgcgacggctatgattacgatgggtaccgtctgcgggtggagtttcctcgaagcggccgtggaacaggccgaggcggcggcgggggtggaggtggcggagctccccgaggtcgctatggccccccatccaggcggtctgaaaacagagtggttgtctctggactgcctccaagtggaagttggcaggatttaaaggatcacatgcgtgaagcaggtgatgtatgttatgctgatgtttaccgagatggcactggtgtcgtggagtttgtacggaaagaagatatgacctatgcagttcgaaaactggataacactaagtttagatctcatgaggtaggttatacacgtattcttttctttgaccagaattggatacagtggtcttaacagtggaatttcaaggtaaggattcaggcaaggttgtcaagtaaattgccagatttctggttttagttacattgtattacttacgcatgtctgaagatagatgaaagcttagatctttcaatggaaagttctgtctatccaatagggagaaactgcctacatccgggttaaagttgatgggcccagaagtccaagttatggaagatctcgatctcgaagccgtagtcgtagcagaagccgtagcagaagcaacagcaggagtcgcagttactccccaaggagaagcagaggatcaccacgctattctccccgtcatagcagatctcgctctcgtacataagatgattggtgacactttttgtagaacccatgttgtatacagttttcctttattcagtacaatcttttcattttttaattcaaactgttttgttcagaatgggctaaagtgttgaattgcattcttgtaatatccccttgctcctaacatctacattcccttcgtgtctttgataaattgtattttaagtgatgtcatagacaggattgtttaaatttagttaactccatactcttcagactgtgatattgtgtaaatgtctatctgccctggtttgtgtgaactgggatgttggggtgtttgtggttatcttacctgggaagttcttagtttatcttgcttttcatgtgtctttctgtagacatatctgaagagatggattaagaatgctttggattaaggattgtggagcacatttcaatcattttaggattgtcaaaaggaggattgaggaggatcagatcaataatggaggcaatggtttggattggagagggctcactggatcccaatccttggagctggatcattggattcaaatcataatgtggataggatagggaggatgaattaccaggattcatggagcgggatcagattaccaggaacataggagtggattcctgccccaaccaaaccgcattcgtgtggatttttttattcaacttaattggc

SEQ ID NO: 10 - DNA, 4379 bp, Homo sapiens
  ref <308>: DATABASE ACCESSION NUMBER: D38549
  ref <309>: DATABASE ENTRY DATE: 2001-06-18
aggaaactcccagggcccgcccaggacccccaagccgccgcggacgcagcccaggatggcggcccaggtgactctggaggacgcgctgtccaacgtggacctcctggaggagctgcccctgcccgaccagcagccctgcatcgagcccccgccatcctcgctgctctaccagccaaatttcaacactaactttgaagacagaaatgcatttgttactggcatcgcaagatacattgaacaagccaccgtccactctagcatgaacgagatgctggaggagggccaagaatatgctgtcatgctgtacacctggaggagctgctcccgggccatcccacaggtgaaatgtaacgagcagcctaacagagtggaaatctacgagaaaaccgtggaggttctggagcctgaggtcacaaaactgatgaatttcatgtacttccagagaaatgccattgagcgtttctgcggggaagtgaggcgcctgtgccatgccgagaggaggaaggacttcgtgtcagaagcctacctgatcacactgggcaaattcatcaacatgttcgctgtgctggacgagctgaagaacatgaagtgcagtgtgaagaacgaccactcagcgtacaagagggccgctcagtttttacgtaaaatggcagatccacagtccatccaggaatcgcagaatctgtccatgttcctggccaatcataacaagatcacacagtctctgcagcagcagctcgaagtgatttctggctacgaagagctcctggcagatattgtgaatctgtgtgtggattactacgagaacaggatgtatttgacgcccagtgagaaacacatgcttctcaaagtcatgggatttggtctgtacctgatggatgggagtgtcagtaacatctataagttggatgccaagaaaagaataaacttatccaaaatcgacaagtacttcaagcaactccaggtggttccgctatttggggacatgcaaatagaactggcaagatatatcaagaccagcgcccactacgaggaaaataaatctcgatggacgtgcacatcctccggcagcagccctcagtacaacatctgcgagcagatgatccagatccgcgaggaccacatgcgcttcatttcggagctggcgcgctacagcaacagcgaggtggtcacgggctcgggccgccaggaggcccagaagacggacgcggagtaccgcaagctcttcgacctggcgctgcagggcctgcagctgttgtcgcagtggagcgcgcacgtgatggaagtgtattcctggaagcttgtgcaccccaccgacaagtactccaacaaggactgccccgacagcgctgaagagtacgagcgtgccacgcgctacaactacaccagcgaggagaagtttgccctagtggaggtgatcgccatgatcaaaggcctgcaggtgctgatgggcaggatggagagcgtgttcaaccacgccatccggcacaccgtctatgccgcactgcaggacttctcccaggtgacccttagggagccgctgcggcaggccatcaagaagaagaagaacgtcatccagagtgtcctgcaggccatcaggaagaccgtgtgtgactgggagacggggcatgagcccttcaatgacccagccttgcggggcgagaaggaccccaagagcggcttcgacataaaagtaccacgccgcgccgtgggaccctccagcactcagctttacatggtgagaaccatgctagagtccctcattgcagacaaaagtggttccaagaaaaccttgagaagtagccttgaggggcccaccatattggacatagaaaaatttcatcgagagtcattcttctacactcacttgataaatttcagtgaaacgctgcagcagtgctgtgacctttcgcagctgtggttccgagagttcttcctggagctgaccatgggcaggaggatccagttccccattgagatgtcgatgccctggatcctgacggaccacatcctggagaccaaggaggcatcgatgatggagtacgtgctctactccctggacctgtacaatgacagcgcccactacgcgctcaccaggttcaacaagcagttcctgtacgacgaaattgaggccgaggtgaatctatgttttgaccaatttgtttacaagctagcagaccagatatttgcctattataaggttatggcaggaagtttgcttcttgataaacggttacgatcagaatgcaagaatcagggagccacgatccacctcccgccgtctaaccgctacgagacgctgctgaagcagaggcatgtgcagctcctcggcagatcaatagacctcaatcgtctgatcacccagcgcgtctcagcagccatgtataagtccctagaactggcgattggacgatttgaaagtgaagatttgacctccatagttgagctggatggcctgttggaaatcaaccgcatgacccacaagctgctgagccggtacctgacgctggacggcttcgacgccatgttccgggaggccaaccacaacgtgtcagcgccctacgggaggatcaccctgcacgtcttctgggagctcaactatgacttcctgcccaactactgctacaacggctctaccaaccggtttgttcggacagtgttaccattttctcaggaatttcaaagagataagcagcctaatgcacagcctcagtatctgcatggatccaaggctttgaacttggcctactccagcatttacggcagctaccggaacttcgtgggacctccacactttcaagtcatctgccggcttctcggctaccagggtatcgccgtggtcatggaggagctgctgaaggtcgtcaagagcctgctgcaaggcacaatcctgcagtacgtgaagacgctgatggaggtgatgcccaagatctgccgcctgccccggcacgagtacggctctcctggtatcctggagttcttccaccaccagctgaaggacatcgtggagtacgcagagctgaagacggtgtgcttccagaacctgcgggaggtggggaacgccatcctcttctgcctgctcatcgagcagagcctgtctttagaagaagtgtgtgacctgctgcacgcggctcctttccagaacatcttgccgcgagtccatgtgaaagagggggagagacttgatgccaaaatgaaaagactagaatcaaagtacgccccgctgcatcttgtcccactgattgaaagactggggacccctcagcaaattgccatcgcaagagagggggacctgctgacaaaggagcgcctctgctgcggcctgtccatgtttgaggtcatcctgacacggatccggagctttctggatgaccccatctggcgcgggcctctgcccagcaatggggtcatgcatgtggacgagtgtgtggagtttcacagactgtggagtgccatgcagtttgtctactgcattcccgtggggacacacgagttcacagtcgagcagtgctttggtgatgggctacactgggctggctgtatgatcatcgtacttcttgggcagcagcggcgttttgctgtgctggatttctgctaccatctacttaaagtccagaaacatgatggcaaagatgagattattaaaaatgtgcctttgaagaagatggtggagagaattcgcaagttccagattctcaatgatgagatcatcaccatcctggataagtacctgaagtcaggcgacggggagggcacgccagtggagcatgtgcgctgcttccagccgcccatccaccagtccctcgccagcagctgagggcacgcgctgcactccgtaactcaacatggcatgcctttctctccgtaaactatttagtgagatttttagggactatttttcagtatctctgtacctgttaaagggggtgcttttcgatctaaaaacttaattttataaaattgacttatttttctagactaaaattgtatatgcttttggtaattaggaactcttgagaatattggctgctgattgttgccatcacgttcctacaaaattgtttttctatgggatgttctggcagctgtgtcataaaatgctgctgggttcattcattcattccataagaaacttaataccagcaaatgcattaaatcccttgccagttaccattaactataactatttagcttttgtttagggatctttctgatgggcttttatgagcaatcttagttctaagtcattgttcccatcccttttttgtgtgtttcagaaaatagtgaacttgattcccctgcttccactaaatccagttgtgacaaaatctaacgtgacatcagatcgaaaggttatagaaataaaactaatgagatct

SEQ ID NO: 11 - DNA, 375 bp, Homo sapiens
  Modified_base 1 ... 375: n = a,c,g, or t
  ref <308>: DATABASE ACCESSION NUMBER: T99512
  ref <309>: DATABASE ENTRY DATE: 2001-06-18
gtcttttaacagctgcaaaataaatattctttcaatggaatgacaattattatttttgccatatatttattttaaaaatttatgtataatggtaacctgagcctgcatgttattcatgtgtggtgccatactgatctttaattttaatgtgaagcaagtactaatatagtaaagcataaattatataaaatttgctttatattttggattgcaaattaattgctgtactttatagaaaagtttcccaaatccgttttacttttttgtatttggaaatttaatcacaggtgggnatcttaaagngggccntttagggggatattggtaaaccgggtgttattaaggggcctaatggttaaccnaccttgaggaggg

SEQ ID NO: 12 - DNA, 1134 bp, Homo sapiens
  ref <308>: DATABASE ACCESSION NUMBER: Y00433
  ref <309>: DATABASE ENTRY DATE: 2001-06-18
cgacccctcgaggggcccagccttggaagggtaactggaccgctgccgcctggttgcctgggccagaccagacatgcctgctgctccttccggcttaggaggagcacgcgtcccgctcgggcgcactctccagccttttcctggctgaggaggggccgagcctccggtagggcgggggccggatgaggcgggacctcaggcccggaaaactgcctgtgccacgtgacccgccgccggccagttaaaaggaggcgcctgctggcctccccttacagtgcttgttcggggcgctccgctggcttcttggacaattgcgccatgtgtgctgctcggctagcggcggcggcggcccagtcggtgtatgccttctcggcgcgcccgttggccggcggggagcctgtgagcctgggctccctgcggggcaaggtactacttatcgagaatgtggcgtccctctgaggcaccacggtccgggactacacccagatgaacgagctgcagcggcgcctcggaccccggggcctggtggtgctcggcttcccgtgcaaccagtttgggcatcaggagaacgccaagaacgaagagattctgaattccctcaagtacgtccggcctggtggtgggttcgagcccaacttcatgctcttcgagaagtgcgaggtgaacggtgcgggggcgcaccctctcttcgccttcctgcgggaggccctgccagctcccagcgacgacgccaccgcgcttatgaccgaccccaagctcatcacctggtctccggtgtgtcgcaacgatgttgcctggaactttgagaagttcctggtgggccctgacggtgtgcccctacgcaggtacagccgccgcttccagaccattgacatcgagcctgacatcgaagccctgctgtctcaagggcccagctgtgcctagggcgcccctcctaccccggctgcttggcagttgcagtgctgctgtctcgggggggttttcatctatgagggtgtttcctctaaacctacgagggaggaacaccttgatcttacagaaaataccacctcgagatgggtgctggtcctgttgatcccagtctctgccagaccaaggcgagtttccccactaataaagtgccgggtgtcagca

SEQ ID NO: 13 - DNA, 2578 bp, Homo sapiens
  ref <308>: DATABASE ACCESSION NUMBER: L31801
  ref <309>: DATABASE ENTRY DATE: 2001-06-18
tctacacttaaaatgccaccagcagttggaggtccagttggatacacccccccagatggaggctggggctgggcagtggtaattggagctttcatttccatcggcttctcttatgcatttcccaaatcaattactgtcttcttcaaagagattgaaggtatattccatgccaccaccagcgaagtgtcatggatatcctccataatgttggctgtcatgtatggtggaggtcctatcagcagtatcctggtgaataaatatggaagtcgtatagtcatgattgttggtggctgcttgtcaggctgtggcttgattgcagcttctttctgtaacaccgtacagcaactatacgtctgtattggagtcattggaggtcttgggcttgccttcaacttgaatccagctctgaccatgattggcaagtatttctacaagaggcgaccattggccaacggactggccatggcaggcagccctgtgttcctctgtactctggcccccctcaatcaggttttcttcggtatctttggatggagaggaagctttctaattcttgggggcttgctactaaactgctgtgttgctggagccctcatgcgaccaatcgggcccaagccaaccaaggcagggaaagataagtctaaagcatcccttgagaaagctggaaaatctggtgtgaaaaaagatctgcatgatgcaaatacagatcttattggaagacaccctaaacaagagaaacgatcagtcttccaaacaattaatcagttcctggacttaaccctattcacccacagaggctttttgctatacctctctggaaatgtgatcatgttttttggactctttgcacctttggtgtttcttagtagttatgggaagagtcagcattattctagtgagaagtctgccttccttctttccattctggcttttgttgacatggtagcccgaccatctatgggacttgtagccaacacaaagccaataagacctcgaattcagtatttctttgcggcttccgttgttgcaaatggagtgtgtcatatgctagcacctttatccactacctatgttggattctgtgtctatgcgggattctttggatttgccttcgggtggctcagctccgtattgtttgaaacattgatggaccttgttggaccccagaggttctccagcgctgtgggattggtgaccattgtggaatgctgtcctgtcctcctggggccaccacttttaggtcggctcaatgacatgtatggagactacaaatacacatactgggcatgtggcgtcgtcctaattatttcaggtatctatctcttcattggcatgggcatcaattatcgacttttggcaaaagaacagaaagcaaacgagcagaaaaaggaaagtaaagaggaagagaccagtatagatgttgctgggaagccaaatgaagttaccaaaacagcagaatctccggaccagaaagacacagaaggagggcccaaggaggaggaaagtccagtctgaatccatggggctgaagggtaaattgagcagttcatgacccaggatatctgaaaatattctactggcctgtaatctaccagtggtgctcaatgcaaatagtagacatttgtgtggaaatcataccagttgttcattgatgggatttttgtttgactccttaccaatagcctgaatttgaggagggaatgattggtagcaaaggatgggggaaagaagtaggttctgttttgttttgttttaatcttagcttttaatagtgtcataaagattataatatgtgccttaagttttagtctttagaactctagagagccttaacttcttaaaccatttttgctgaattcatctatttcgagtgttgtgttaaaaggaaaaataacaactaacttgtttgaggcaaatctaaaatttaaaattaatcttgcttcattgttacatgtaatatatttcagacattttcactggaagatttatgaacagaaatattggttgaaagttagagattttacaaaatgctgacaaaaatattttcctagcatcagtagatttctggcatatgtttctgctagctatatatttaggaaattcaaagcataaaactttggcaacatcttggctgttctagacacagtgtacttgtcaacccctctcaggtaccttttcttgggatgcttattagaagccaagtaaagtgcttaaggtttgttttcattaaattagctatttctgctcccctgttcaaagatgcattttgagtgtttatagatcactgccctttttgaaatcacctggtattatttttcttactggaaaagttagtattaaaatctacagaactacatatttgtgcctccttggtaaatacaacacatctaattaaatgtagacagatatttcaaacatcagctgaattcacttaagtttttccaaaacctcagttaaactgtgaagctattggaatttttttttcctggaatttttcccctttgattcacagtggtcccatttatatctgcttctagcttagtgctatgtgtgagatatgtgtgtgtttggtgttttt

SEQ ID NO: 14 - DNA, 9473 bp, Homo sapiens
  ref <308>: DATABASE ACCESSION NUMBER: AF043045
  ref <309>: DATABASE ENTRY DATE: 2001-06-18
ggcggccaggggcgggcggccgcagagcagcaccggccgtggctccggtagcagcaagttcgaaccccgctcccgctccgcttcggttctcgctccttcgcccttgggcctccaaacaccagtccccggcagctcgttgcgcattgcgctctccccgccaccaggatgccggtaaccgagaaggatctagctgaggacgcgccttggaagaagatccagcagaacacgttcacacgctggtgcaacgagcacctcaagtgcgtgaacaaacgcatcggcaacctgcagaccgacctgagcgacgggctgcggctcatcgcgctgctcgaggtgctcagccagaagcgcatgtaccgcaagtaccatcagcggcccacctttcgccagatgcagctcgagaatgtgtccgtggcgctcgagttcctggaccgtgagagcatcaagctcgtgtccatcgatagcaaagccattgtggatgggaacctgaagctcatcttgggtctggtgtggacgctgatcctccactactccatctccatgcccgtgtgggaggatgaaggggatgatgatgccaagaagcagacgccaaagcagaggctgctggggtggattcagaacaagatcccctacttgcccatcaccaactttaaccagaactggcaagacggcaaagccctgggagccctggtagacagctgtgctccaggtctgtgcccagactgggaatcctgggacccgcagaagcctgtggataatgcacgagaagccatgcagcaggcagatgactggctgggtgtcccacaggtcatcactcctgaagaaatcattcacccggatgtggacgagcactcagttatgacttacctgtcccagttccccaaagccaagctcaagccgggggctcctctcaaacccaaactcaacccgaagaaagccagggcctatggcagaggaatcgagcccactggaaacatggtgaagcagccagccaagttcactgtggacaccatcagcgccgggcaaggagacgtgatggtgtttgttgaggacccagaagggaacaaagaggaggcacaagtgacccctgacagtgacaagaacaagacatactctgtggagtatctgcccaaggtcaccgggctacacaaagtcacagtcctctttgcaggacagcacatctccaagagcccatttgaagtgagtgttgacaaggcccagggagatgccagtaaagtcactgcaaaaggtccagggttggaagctgtagggaacatcgccaataagcccacctactttgacatctatacggcaggagctggtgtgggtgacattggtgtggaggtggaagatccccaggggaagaacaccgtggagttgctcgtggaagacaaaggaaaccaggtgtatcgatgtgtgtacaaacccatgcagcctggccctcacgtggtcaagatcttctttgctggggacactattcctaagagtcccttcgttgtgcaggttggggaagcctgcaatccaaatgcctgccgggccagtggccgaggcctacaacccaaaggcgtccgtatccgggagaccacagatttcaaggttgacaccaaagctgcaggaagtggggagctcggtgtaaccatgaagggtcctaagggtctggaggagctggtgaagcagaaagactttctggatggggtctacgcattcgagtattaccccagcaccccggggagatacagcattgccatcacatgggggggacaccacattccaaagagcccctttgaagttcaagttggccctgaagcgggtatgcagaaagtccgtgcttggggccctgggctccatggtgggattgtcgggcggtcagcggacttcgtggtagaatccattggctctgaagtggggtctctggggtttgccattgaaggcccctctcaggcaaagattgagtacaacgaccagaatgatggatcgtgtgatgtcaaatactggcccaaggagcctggcgaatatgctgttcacatcatgtgtgacgacgaagacatcaaggacagcccgtacatggccttcatccacccagccacgggaggctacaaccctgatctggttcgagcatacgggccaggtttggagaaatctggatgcattgtcaacaacctggccgagttcactgtggatcctaaggatgctggaaaagctcccttaaagatatttgctcaggatggggaaggccaacgcattgacatccagatgaagaaccggatggacggcacatatgcatgctcatacaccccggtgaaggccatcaagcacaccattgctgtggtctggggaggcgtgaacatcccgcacagcccctacagggtcaacatcgggcaaggtagccatcctcagaaggtcaaagtgtttgggccaggtgtggagagaagtggtctgaaggcaaatgaacctacacacttcacggtggactgtactgaggctggggaaggtgatgtcagtgttggcattaagtgtgatgcccgggtgttaagtgaagatgaggaagacgtggattttgacattattcacaatgccaatgatacgttcacagtcaaatatgtgcctcctgctgctgggcgatacactatcaaagttctctttgcatctcaggaaatccccgccagccctttcagagtcaaagttgacccttcccacgatgccagcaaagtgaaggcagaaggcccagggctcagcaaagcaggtgtggaaaatgggaaaccgacccacttcactgtctacaccaagggggctgggaaagccccgctcaacgtgcagttcaacagccctcttcctggcgatgcagtgaaggatttggatatcatcgataattatgactactctcacacggttaaatatacacccacccaacagggcaacatgcaggttctggtgacttacggtggcgatcccatccctaaaagccctttcactgtgggtgttgctgcaccgctggatctgagcaagataaaactcaatgggctggaaaacagggtggaagttgggaaggatcaggagttcaccgttgataccaggggggcaggaggccaggggaagctggacgtgacaatcctcagcccctctcggaaggtcgtgccatgcctagtgacacctgtgacaggccgggagaacagcacggccaagttcatccctcgggaggaggggctgtatgctgtagacgtgacctacgatggacaccctgtgcccgggagcccctacacagtggaggcctcgctgccaccagatcccagcaaggtgaaggcccacggtcccggcctcgaaggtggtctcgtgggcaagcctgccgagttcaccatcgataccaaaggagctggtactggaggtctgggcttaacggtggaaggtccgtgcgaggccaaaatcgagtgctccgacaatggtgatgggacctgctccgtctcttaccttcccacaaaacccggggagtacttcgtcaacatcctctttgaagaagtccacatacctgggtctcccttcaaagctgacattgaaatgccctttgacccctctaaagtcgtggcatcggggccaggtctcgagcacgggaaggtgggtgaagctggcctccttagcgtcgactgctcggaagcgggaccgggggccctgggcctggaagctgtctcggactcgggaacaaaagccgaagtcagtattcagaacaacaaagatggcacctacgcggtgacctacgtgcccctgacggccggcatgtacacgttgaccatgaagtatggtggcgaactcgtgccacacttccccgcccgggtcaaggtggagcccgccgtggacaccagcaggatcaaagtctttggaccaggaatagaagggaaagatgtgttccgggaagctaccaccgactttacagttgactctcggccgctgacccaggttgggggtgaccacatcaaggcccacattgccaacccctcaggggcctccaccgagtgctttgtcacagacaatgcggatgggacctaccaggtggaatacacaccctttgagaaaggtctccatgtagtggaggtgacatatgatgacgtgcctatcccaaacagtcccttcaaggtggctgtcactgaaggctgccagccatctagggtgcaagcccaaggacctggattgaaagaggcctttaccaacaagcccaatgtcttcaccgtggttaccagaggcgcaggaattggtgggcttggcataactgttgagggaccatcagagtcgaagataaattgcagagacaacaaggatggcagctgcagtgctgagtacattcctttcgcgccgggggattacgatgttaatatcacatatggaggagcccacatccccggcagccccttcagggttcctgtgaaggatgttgtggaccccagcaaggtcaagattgccggccccgggctgggctcaggcgtccgagcccgtgtcctgcagtccttcacggtggacagcagcaaggctggcctggctccgctggaagtgagggttctgggcccacgaggcttggtggagccagtgaacgtggtggacaatggagatggcacacacacagtaacctacaccccatctcaggagggaccttacatggtctcagttaaatatgctgatgaagagattcctcgcagtcccttcaaggtcaaggtccttcccacatatgatgccagcaaagtgactgccagtggccccggccttagttcctatggtgtgcctgccagtctacctgtggactttgcaattgatgcccgagatgccggggaaggcctgcttgctgttcaaataacggaccaagaaggaaaacccaaaagagccattgtccatgacaataaagatggcacgtatgctgtcacctacatccccgacaagactgggcgctatatgattggagtcacctacgggggtgacgacatcccactttctccttatcgcatccgagccacacagacgggtgatgccagcaagtgcctggccacgggtcctggaatcgcctccactgtgaaaactggcgaagaagtaggctttgtggttgatgccaagactgccgggaagggtaaagtgacctgcacggttctgaccccagatggcactgaggccgaggccgatgtcattgagaatgaagatggaacctatgacatcttctacacagctgccaagccgggcacatatgtgatctatgtgcgcttcggtggtgttgatattcctaacagccccttcactgtcatggccacagatggggaagtcacagccgtggaggaggcaccggtaaatgcatgtccccctggattcaggccctgggtgaccgaagaggcctatgtcccagtgagtgacatgaacggcctgggatttaagccttttgacctggtcattccgtttgctgtcaggaaaggagaaatcactggagaggtccacatgccttctgggaagacagccacacctgagattgtggacaacaaggacggcacggtcactgttagatatgcccccactgaggtcgggctccatgagatgcacatcaaatacatgggcagccacatccctgagagcccactccagttctacgtgaactaccccaacagtggaagtgtttctgcatacggtccaggcctcgtgtatggagtggccaacaaaactgccaccttcaccatcgtcacagaggatgcaggagaaggtggtctggacttggctattgagggcccctcaaaagcagaaatcagctgcattgacaataaagatgggacatgcacagtgacctacctgccgactctgccaggcgactacagcattctggtcaagtacaatgacaagcacatccctggcagccccttcacagccaagatcacagatgacagcaggcggtgctcccaggtgaagttgggctcagccgctgacttcctgctcgacatcagtgagactgacctcagcagcctgacggccagcattaaggccccatctggccgagacgagccctgtctcctgaagaggctgcccaacaaccacattggcatctccttcatcccccgggaagtgggcgaacatctggtcagcatcaagaaaaatggcaaccatgtggccaacagccccgtgtctatcatggtggtccagtcggagattggtgacgcccgccgagccagagtctatggccgcggcctgtcagaaggccggactttcgagatgtctgacttcatcgtggacacaagggatgcaggttatggtggcatatccttggcggtggaaggccccagcaaagtggacatccagacggaggacctggaagatggcacctgcaaagtctcctacttccctaccgtgcctggggtttatatcgtctccaccaaattcgctgacgagcacgtgcctgggagcccatttaccgtgaagatcagtggggagggaagagtcaaagagagcatcacccgcaccagtcgggccccgtccgtggccactgtcgggagcatttgtgacctgaacctgaaaatcccagaaatcaacagcagtgatatgtcggcccacgtcaccagcccctctggccgtgtgactgaggcagagattgtgcccatggggaagaactcacactgcgtccggtttgtgccccaggagatgggcgtgcacacggtcagcgtcaagtaccgtgggcagcacgtcaccggcagccccttccagttcaccgtggggccacttggtgaaggaggcgcccacaaggtgcgggcaggaggccctggcctggagagaggagaagcgggagtcccagctgagttcagcatttggacccgggaagcaggcgctggaggcctctccatcgctgttgagggccccagtaaggccgagattacattcgatgaccataaaaatgggtcgtgcggtgtatcttatattgcccaagagcctggtaactacgaggtgtccatcaagttcaatgatgagcacatcccggaaagcccctacctggtgccggtcatcgcaccctccgacgacgcccgccgcctcactgttatgagccttcaggaatcgggattaaaagttaaccagccagcatcctttgctataaggttgaatggcgcaaaaggcaagattgatgcaaaggtgcacagcccctctggagccgtggaggagtgccacgtgtctgagctggagccagataagtatgctgttcgcttcatccctcatgagaatggtgtccacaccatcgatgtcaagttcaatgggagccacgtggttggaagccccttcaaagtgcgcgttggggagcctggacaagcggggaaccctgccctggtgtccgcctatggcacgggactcgaagggggcaccacaggtatccagtcggaattctttattaacaccacccgagcaggtccagggacattatccgtcaccatcgaaggcccatccaaggttaaaatggattgccaggaaacacctgaagggtacaaagtcatgtacacccccatggctcctggtaactacctgatcagtgtcaaatacggtgggcccaaccacatcgtgggcagtcccttcaaggccaaggtgacaggccagcgtctagttagccctggctcagccaacgagacctcatccatcctggtggagtcagtgaccaggtcgtctacagagacctgctatagcgccattcccaaggcatcctcggacgccagcaaggtgacctctaagggggcagggctctcaaaggcctttgtgggccagaagagttccttcctggtggactgcagcaaagctggctccaacatgctgctgatcggggtccatgggcccaccaccccctgcgaggaggtctccatgaagcatgtaggcaaccagcaatacaacgtcacatacgtcgtcaaggagaggggcgattatgtgctggctgtgaagtggggggaggaacacatccctggcagcccttttcatgtcacagtgccttaaaacagttttctcaaatcctggagagagttcttgtggttgcctttgttgcttgtttgtaattcattttatacaaagccctccagcctgtttgtggggctgaaaccccatccctaaaatattgctgttgtaaaatgccttcagaaataagtcctagactggactcttgagggacatattggagaatcttaagaaatgcaagcttgttcagggggctgagaagatcctgagtacactaggtgcaaaccagaactcttggtggaacagaccagccactgcagcagacagaccaggaacacaatgagactgacatttcaaaaaaacaaaactggctagcctgagctgctggttcactcttcagcatttatgaaacaaggctaggggaagatgggcagagaaaaaggggacacctagtttggttgtcatttggcaaaggagatgacttaaaaatccgcttaatctcttccagtgtccgtgttaatgtatttggctattagatcactagcactgctttaccgctcctcatcgccaacacccccatgctctgtggccttcttacacttctcagagggcagagtggcagccgggcaccctacagaaactcagagggcagagtggcagccaggcccacatgtctctcaagtacctgtcccctcgctctggtgattatttcttgcagaatcaccacacgagaccatcccggcagtcatggttttgctttagttttccaagtccgtttcagtcccttccttggtctgaagaaattctgcagtggcgagcagtttcccacttgccaaagatcccttttaaccaacactagcccttgtttttaacacacgctccagcccttcatcagcctgggcagtcttaccaaaatgtttaaagtgatctcagaggggcccatggattaacgccctcatcccaaggtccgtcccatgacataacactccacacccgccccagccaacttcatgggtcactttttctggaaaataatgatctgtacagacaggacagaatgaaactctgcgggtctttggcctgaaagttgggaatggttgggggagagaagggcagcagcttattggtggtcttttcaccattggcagaaacagtgagagctgtgtggtgcagaaatccagaaatgaggtgtagggaattttgcctgccttcctgcagacctgagctggctttggaatgaggttaaagtgtcagggacgttgcctgagcccaaatgtgtagtgtggtctgggcaggcagacctttaggttttgctgcttagtcctgaggaagtggccactcttgtggcaggtgtagtatctggggcgagtgttgggggtaaaagcccaccctacagaaagtggaacagcccggagcctgatgtgaaaggaccacgggtgttgtaagctgggacacggaagccaaactggaatcaaacgccgactgtaaattgtatcttataacttattaaataaaacatttgctccgtaaaaaaaaaaaaa

SEQ ID NO: 15 - DNA, 1444 bp, Homo sapiens
  ref <308>: DATABASE ACCESSION NUMBER: X75252
  ref <309>: DATABASE ENTRY DATE: 2001-06-18
ggggggtctgcgtcttcccgagccagtgtgctgagctctccgcgtcgcctctgtcgcccgcgcctggcctaccgcggcactcccggctgcacgctctgcttggcctcgccatgccggtggacctcagcaagtggtccgggcccttgagcctgcaagaagtggacgagcagccgcagcacccgctgcatgtcacctacgccggggcggcggtggacgagctgggcaaagtgctgacgcccacccaggttaagaatagacccaccagcatttcgtgggatggtcttgattcagggaagctctacaccttggtcctgacagacccggatgctcccagcaggaaggatcccaaatacagagaatggcatcatttcctggtggtcaacatgaagggcaatgacatcagcagtggcacagtcctctccgattatgtgggctcggggcctcccaagggcacaggcctccaccgctatgtctggctggtttacgagcaggacaggccgctaaagtgtgacgagcccatcctcagcaaccgatctggagaccaccgtggcaaattcaaggtggcgtccttccgtaaaaagtatgagctcagggccccggtggctggcacgtgttaccaggccgagtgggatgactatgtgcccaaactgtacgagcagctgtctgggaagtagggggttagcttggggacctgaactgtcctggaggccccaagccatgttccccagttcagtgttgcatgtataatagatttctcctcttcctgccccccttggcatgggtgagacctgaccagtcagatggtagttgagggtgacttttcctgctgcctggcctttataattttactcactcactctgatttatgttttgatcaaatttgaacttcattttggggggtattttggtactgtgatggggtcatcaaattattaatctgaaaatagcaacccagaatgtaaaaaagaaaaaactggggggaaaaagaccaggtctacagtgatagagcaaagcatcaaagaatctttaagggaggtttaaaaaaaaaaaaaaaaaaaaagattggttgcctctgcctttgtgatcctgagtccagaatggtacacaatgtgattttatggtgatgtcactcacctagacaaccagaggctggcattgaggctaacctccaacacagtgcatctcagatgcctcagtaggcatcagtatgtcactctggtccctttaaagagcaatcctggaagaagcaggagggagggtggctttgctgttgttgggacatggcaatctagaccggtagcagcgcctcgctgacagcttgggaggaaacctgagatctgtgttttttaaattgatcgttcttcatgggggtaagaaaagctggtctggagttgctgaatgttgcattaattgtgctgtttgcttgtagttgaataaaaacccg

SEQ ID NO: 16 - DNA, 1426 bp, Homo sapiens
  ref <308>: DATABASE ACCESSION NUMBER: X53793
  ref <309>: DATABASE ENTRY DATE: 2001-06-18
gcagccctcagcccacttaggataatggcgacagctgaggtactgaacattggtaaaaaattatatgagggtaaaacaaaagaagtctacgaattgttagacagtccaggaaaagtcctcctgcagtccaaggaccagattacagcaggaaatgcagctagaaaaaaccacctggaaggaaaagctgcaatctcaaataaaatcaccagttgtatttttcagttattacaggaagcaggtattaaaactgccttcaccagaaaatgtggggagacagctttcattgcaccgcagtgtgaaatgattccaattgaatgggtttgcagaagaatagcaactggttcttttctcaaaagaaatcctggtgtcaaggaaggatataagttttacccacctaaagtggagttgtttttcaaggatgatgccaataatgacccacagtggtctgaggaacagctgattgctgcaaaattttgctttgctggacttcttataggccagactgaagtggatatcatgagtcatgctacacaggctatatttgaaatactggagaaatcctggttgccccagaattgtacactggttgatatgaagattgaatttggtgttgatgtaaccaccaaagaaattgttcttgctgatgttattgacaatgattcctggagactctggccatcaggagatcgaagccaacagaaagacaaacagtcttatcgggacctcaaagaagtaactcctgaagggctccaaatggtaaagaaaaactttgagtgggttgcagagagagtagagttgcttttgaaatcagaaagtcagtgcagggttgtagtgttgatgggctctacttctgatcttggtcactgtgaaaaaatcaagaaggcctgtggaaattttggcattccatgtgaacttcgagtaacatctgcgcataaaggaccagatgaaactctgaggattaaagctgagtatgaaggggatggcattcctactgtatttgtggcagtggcaggcagaagtaatggtttgggaccagtgatgtctgggaacactgcatatccagttatcagctgtcctcccctcacaccagactggggagttcaggatgtgtggtcttctcttcgactacccagtggtcttggctgttcaaccgtactttctccagaaggatcagctcaatttgctgctcagatatttgggttaagcaaccatttggtatggagcaaactgcgagcaagcattttgaacacatggatttccttgaagcaggctgacaagaaaatcagagaatgtaatttataagaaagaatgccattgaattttttaggggaaaaactacaaatttctaatttagctgaaggaaaatcaagcaagatgaaaaggtaattttaaattagagaacacaaataaaatgtattagtgaaca

SEQ ID NO: 17 - DNA, 1413 bp, Homo sapiens
  ref <308>: DATABASE ACCESSION NUMBER: M14505
  ref <309>: DATABASE ENTRY DATE: 2001-06-18
agccctcccagtttccgcgcgcgtctttggcagctggtcacatggtgagggtgggggtgagggggcctctctagcttgcggcctgtgtctatggtcgggccctctgcgtccagctgctccggaccgagctcgggtgtatggggccgtaggaaccggctccggggccccgataacgggccgcccccacagcaccccgggctggcgtgagggtctcccttgatctgagaatggctacctctcgatatgagccagtggctgaaattggtgtcggtgcctatgggacagtgtacaaggcccgtgatccccacagtggccactttgtggccctcaagagtgtgagagtccccaatggaggaggaggtggaggaggccttcccatcagcacagttcgtgaggtggctttactgaggcgactggaggcttttgagcatcccaatgttgtccggctgatggacgtctgtgccacatcccgaactgaccgggagatcaaggtaaccctggtgtttgagcatgtagaccaggacctaaggacatatctggacaaggcacccccaccaggcttgccagccgaaacgatcaaggatctgatgcgccagtttctaagaggcctagatttccttcatgccaattgcatcgttcaccgagatctgaagccagagaacattctggtgacaagtggtggaacagtcaagctggctgactttggcctggccagaatctacagctaccagatggcacttacacccgtggttgttacactctggtaccgagctcccgaagttcttctgcagtccacatatgcaacacctgtggacatgtggagtgttggctgtatctttgcagagatgtttcgtcgaaagcctctcttctgtggaaactctgaagccgaccagttgggcaaaatctttgacctgattgggctgcctccagaggatgactggcctcgagatgtatccctgccccgtggagcctttccccccagagggccccgcccagtgcagtcggtggtacctgagatggaggagtcgggagcacagctgctgctggaaatgctgacttttaacccacacaagcgaatctctgcctttcgagctctgcagcactcttatctacataaggatgaaggtaatccggagtgagcaatggagtggctgccatggaaggaagaaaagctgccatttcccttctggacactgagagggcaatctttgcctttatctctgaggctatggagggtcctcctccatctttctacagagattactttgctgccttaatgacattcccctcccacctctccttttgaggcttctccttctccttcccatttctctacactaaggggtatgttccctcttgtccctttccctacctttatatttggggtccttttttatacaggaaaaacaaaac

SEQ ID NO: 18 - DNA, 876 bp, Homo sapiens
  Modified_base 1 ... 876: n = a,c,g, or t
  ref <308>: DATABASE ACCESSION NUMBER: AI557064
  ref <309>: DATABASE ENTRY DATE: 2001-06-18
gaattctggcacgaggtgaacagtgtggcccgccatgttcttctccgcggcgtccgggcccgggcggctggcctcaccgcccactggggaagacatgtaaggaatttgcataagacagctatgcaaaatggagctggaggagctttatttgtgcacagagatactcctgagaataaccctgatactccatttgatttcacaccagaaaactataagaggatagaggcaattgttaaaaactatccagaaggccataaagcagcagctgttcttccagtcctggatttagcccaaaggcagaatgggtggttgcccatctctgctatgaacaaggttgcagaagttttacaagtacctccaatgagagtatatgaagtagcaactttttatacaatgtataatcgaaagccagttggaaagtatcacattcaggtctgcactactanaccctgcatgcttcgaaactctgacagcatactggaggccattcagaaaaagcttggaataaaggttngggagactacacctgacaaacttttcactcttatagaagtggaatgtttaggggctgtgtgaacgcaccaatggtcaaataaatggcaattacnatgagggttgacagctaagggnttgagaaattattggtgagccaaaggntggcaaaatcccnaaancaggggcaaggagtgncgcnntcttgtgagcaagctggggggcttaccctttgctgancacccaaggggcctggtttggggtcaaanaaggctttaatttaaattgactggnaaatgcccntggggaataaaattggntncaacnccgnaaaaagaaangaanaaaaaacccggagggggggccnggaccnantncnccttt

SEQ ID NO: 19 - DNA, 1132 bp, Homo sapiens
  ref <308>: DATABASE ACCESSION NUMBER: J04794
  ref <309>: DATABASE ENTRY DATE: 2001-06-18
agccagaaatgtgaagtgctagctgaaggatgagcagcagctagccaggcaaagggggcaatggcggcttcctgtgttctactgcacactgggcagaagatgcctctgattggtctgggtacctggaagagtgagcctggtcaggtaaaagcagctgttaagtatgcccttagcgtaggctaccgccacattgattgtgctgctatctacggcaatgagcctgagattggggaggccctgaaggaggacgtgggaccaggcaaggcggtgcctcgggaggagctgtttgtgacatccaagctgtggaacaccaagcaccaccccgaggatgtggagcctgccctccggaagactctggctgacctccagctggagtatctggacctgtacctgatgcactggccttatgcctttgagcggggagacaaccccttccccaagaatgctgatgggactatatgctacgactccacccactacaaggagacttggaaggctctggaggcactggtggctaaggggctggtgcaggcgctgggcctgtccaacttcaacagtcggcagattgatgacatactcagtgtggcctccgtgcgtccagctgtcttgcaggtggaatgccacccatacttggctcaaaatgagctaattgcccactgccaagcacgtggcttggaggtaactgcttatagccctttgggctcctctgatcgtgcatggcgtgatcctgatgagcctgtcctgctggaggaaccagtagtcctggcattggctgaaaagtatggccgatctccagctcagatcttgctcaggtggcaggtccagcggaaagtgatctgcatccccaaaagtatcactccttctcgaatccttcagaacatcaaggtgtttgacttcacctttagcccagaagagatgaagcagctaaatgccctgaacaaaaattggagatatattgtgcctatgcttacggtggatgggaagagagtcccaagggatgcagggcatcctctgtacccctttaatgacccgtactgagaccacagcttcttggcctcccttccagctctgcagctaatgaggtcctgccacaacggaaagagggagttaataaagccattggagcatccat

SEQ ID NO: 20 - DNA, 1093 bp, Homo sapiens
  ref <308>: DATABASE ACCESSION NUMBER: M24194
  ref <309>: DATABASE ENTRY DATE: 2001-06-18
ctgcaaggcggcggcaggagaggttgtggtgctagtttctctaagccatccagtgccatcctcgtcgctgcagcgacaccgctctcgccgccgccatgactgagcagatgacccttcgtggcaccctcaagggccacaacggctgggtaacccagatcgctactaccccgcagttcccggacatgatcctctccgcctctcgagataagaccatcatcatgtggaaactgaccagggatgagaccaactatggaattccacagcgtgctctgcggggtcactcccactttgttagtgatgtggttatctcctcagatggccagtttgccctctcaggctcctgggatggaaccctgcgcctctgggatctcacaacgggcaccaccacgaggcgatttgtgggccataccaaggatgtgctgagtgtggccttctcctctgacaaccggcagattgtctctggatctcgagataaaaccatcaagctatggaataccctgggtgtgtgcaaatacactgtccaggatgagagccactcagagtgggtgtcttgtgtccgcttctcgcccaacagcagcaaccctatcatcgtctcctgtggctgggacaagctggtcaaggtatggaacctggctaactgcaagctgaagaccaaccacattggccacacaggctatctgaacacggtgactgtctctccagatggatccctctgtgcttctggaggcaaggatggccaggccatgttatgggatctcaacgaaggcaaacacctttacacgctagatggtggggacatcatcaacgccctgtgcttcagccctaaccgctactggctgtgtgctgccacaggccccagcatcaagatctgggatttagagggaaagatcattgtagatgaactgaagcaagaagttatcagtaccagcagcaaggcagaaccaccccagtgcacttccctggcctggtctgctgatggccagactctgtttgctggctacacggacaacctggtgcgagtgtggcaggtgaccattggcacacgctagaagtttatggcagagctttacaaataaaaaaaaaatggcttttc

SEQ ID NO: 21 - DNA, 732 bp, Homo sapiens
  ref <308>: DATABASE ACCESSION NUMBER: X17620
  ref <309>: DATABASE ENTRY DATE: 2001-06-18
tgctgcgaaccacgtgggtcccgggcgcgtttcgggtgctggcggctgcagccggagttcaaacctaagcagctggaaggaaccatggccaactgtgagcgtaccttcattgcgatcaaaccagatggggtccagcggggtcttgtgggagagattatcaagcgttttgagcagaaaggattccgccttgttggtctgaaattcatgcaagcttccgaagatcttctcaaggaacactacgttgacctgaaggaccgtccattctttgccggcctggtgaaatacatgcactcagggccggtagttgccatggtctgggaggggctgaatgtggtgaagacgggccgagtcatgctcggggagaccaaccctgcagactccaagcctgggaccatccgtggagacttctgcatacaagttggcaggaacattatacatggcagtgattctgtggagagtgcagagaaggagatcggcttgtggtttcaccctgaggaactggtagattacacgagctgtgctcagaactggatctatgaatgacaggagggcagaccacattgcttttcacatccatttcccctccttcccatgggcagaggaccaggctgtaggaaatctagttatttacaggaacttcatcataatttggagggaagctcttggagctgtgagttctccctgtacagtgttaccatccccgaccatctgattaaaatgcttcctcccagc

SEQ ID NO: 22 - DNA, 1272 bp, Homo sapiens
  ref <308>: DATABASE ACCESSION NUMBER: X73460
  ref <309>: DATABASE ENTRY DATE: 2001-06-18
ggcgtgatgtctcacagaaagttctccgctcccagacatgggtccctcggcttcctgcctcggaagcgcagcagcaggcatcgtgggaaggtgaagagcttccctaaggatgacccatccaagccggtccacctcacagccttcctgggatacaaggctggcatgactcacatcgtgcgggaagtcgacaggccgggatccaaggtgaacaagaaggaggtggtggaggctgtgaccattgtagagacaccacccatggtggttgtgggcattgtgggctacgtggaaacccctcgaggcctccggaccttcaagactgtctttgctgagcacatcagtgatgaatgcaagaggcgtttctataagaattggcataaatctaagaagaaggcctttaccaagtactgcaagaaatggcaggatgaggatggcaagaagcagctggagaaggacttcagcagcatgaagaagtactgccaagtcatccgtgtcattgcccacacccagatgcgcctgcttcctctgcgccagaagaaggcccacctgatggagatccaggtgaacggaggcactgtggccgagaagctggactgggcccgcgagaggcttgagcagcaggtacctgtgaaccaagtgtttgggcaggatgagatgatcgacgtcatcggggtgaccaagggcaaaggctacaaaggggtcaccagtcgttggcacaccaagaagctgccccgcaagacccaccgaggcctgcgcaaggtggcctgtattggggcatggcatcctgctcgtgtagccttctctgtggcacgcgctgggcagaaaggctaccatcaccgcactgagatcaacaagaagatttataagattggccagggctaccttatcaaggacggcaagctgatcaagaacaatgcctccactgactatgacctatctgacaagagcatcaaccctctgggtggctttgtccactatggtgaagtgaccaatgactttgtcatgctgaaaggctgtgtggtgggaaccaagaagcgggtgctcaccctccgcaagtccttgctggtgcagacgaagcggcgggctctggagaagattgaccttaagttcattgacaccacctccaagtttggccatggccgcttccagaccatggaggagaagaaagcattcatgggaccactgaagaaagaccgaattgcaaaggaagaaggagcttaatgccaggaacagattttgcagttggtggggtctcaataaaattattttccactg

SEQ ID NO: 23 - DNA, 2165 bp, Homo sapiens
  ref <308>: DATABASE ACCESSION NUMBER: X92720
  ref <309>: DATABASE ENTRY DATE: 2001-06-18
cccgccttccatacctccccggctccgctcggttcctggccaccccgcagcccctgcccaggtgccatggccgcattgtaccgccctggcctgcggcttaactggcatgggctgagccccttgggctggccatcatgccgtagcatccagaccctgcgagtgcttagtggagatctgggccagcttcccactggcattcgagattttgtagagcacagtgcccgcctgtgccaaccagagggcatccacatctgtgatggaactgaggctgagaatactgccacactgaccctgctggagcagcagggcctcatccgaaagctccccaagtacaataactgctggctggcccgcacagaccccaaggatgtggcacgagtagagagcaagacggtgattgtaactccttctcagcgggacacggtaccactcccgcctggtggggcctgtgggcagctgggcaactggatgtccccagctgatttccagcgagctgtggatgagaggtttccaggctgcatgcagggccgcaccatgtatgtgcttccattcagcatgggtcctgtgggctccccgctgtcccgcatcggggtgcagctcactgactcagcctatgtggtggcaagcatgcgtattatgacccgactggggacacctgtgcttcaggccctgggagatggtgactttgtcaagtgtctgcactccgtgggccagcccctgacaggacaaggggagccagtgagccagtggccgtgcaacccagagaaaaccctgattggccacgtgcccgaccagcgggagatcatctccttcggcagcggctatggtggcaactccctgctgggcaagaagtgctttgccctacgcatcgcctctcggctggcccgggatgagggctggctggcagagcacatgctgatcctgggcatcaccagccctgcagggaagaaggcgctatgtgcagccgccttccctagtgcctgtggcaagaccaacctggctatgatgcggcctgcactgccaggctggaaagtggagtgtgtgggggatgatattgcttggatgaggtttgacagtgaaggtcgactccgggccatcaaccctgagaacggcttctttggggttgcccctggtacctctgccaccaccaatcccaacgccatggctacaatccagagtaacactatttttaccaatgtggctgagaccagtgatggtggcgtgtactgggagggcattgaccagcctcttccacctggtgttactgtgacctcctggctgggcaaaccctggaaacctggtgacaaggagccctgtgcacatcccaactctcgattttgtgccccggctcgccagtgccccatcatggacccagcctgggaggccccagagggtgtccccattgacgccatcatctttggtggccgcagacccaaaggggtacccctggtatacgaggccttcaactggcgtcatggggtgtttgtgggcagagccatgcgctctgagtccactgctgcagcagaacacaaagggaagatcatcatgcacgacccatttgccatgcggcccttttttggctacaacttcgggcactacctggaacactggctgagcatggaagggcgcaagggggcccagctgccccgtatcttccatgtcaactggttccggcgtgacgaggcagggcacttcctgtggccaggctttggggagaatgctcgggtgctagactggatctgccggcggttagagggggaggacagtgcccgagagacacccattgggctggtgccaaaggaaggagccttggatctcagcggcctcagagctatagacaccactcagctgttctccctccccaaggacttctgggaacaggaggttcgtgacattcggagctacctgacagagcaggtcaaccaggatctgcccaaagaggtgttggctgagcttgaggccctggagagacgtgtgcacaaaatgtgacctgaggcctagtctagcaagaggacatagcaccctcatctgggaatagggaaggcaccttgcagaaaatatgagcaattgatattaactaacatcttcaatgtgccatagaccttcccacaaagactgtccaataataagagatgcttatctattttaaaaaaaaaaaaaaaaaa

SEQ ID NO: 24 - DNA, 888 bp, Homo sapiens
  ref <308>: DATABASE ACCESSION NUMBER: M58458
  ref <309>: DATABASE ENTRY DATE: 2001-06-18
aagacggaggtcctctttccttgcctaacgcagccatggctcgtggtcccaagaagcatctgaagcgggtggcagctccaaagcattggatgctggataaattgaccggtgtgtttgctcctcgtccatccaccggtccccacaagttgagagagtgtctccccctcatcattttcctgaggaacagacttaagtatgccctgacaggagatgaagtaaagaagatttgcatgcagcggttcattaaaatcgatggcaaggtccgaactgatataacctaccctgctggattcatggatgtcatcagcattgacaagacgggagagaatttccgtctgatctatgacaccaagggtcgctttgctgtacatcgtattacacctgaggaggccaagtacaagttgtgcaaagtgagaaagatctttgtgggcacaaaaggaatccctcatctggtgactcatgatgcccgcaccatccgctaccccgatcccctcatcaaggtgaatgataccattcagattgatttggagactggcaagattactgatttcatcaagttcgacactggtaacctgtgtatggtgactggaggtgctaacctaggaagaattggtgtgatcaccaacagagagaggcaccctggatcttttgacgtggttcacgtgaaagatgccaatggcaacagctttgccactcgactttccaacatttttgttattggcaagggcaacaaaccatggatttctcttccccgaggaaagggtatccgcctcaccattgctgaagagagagacaaaagactggcggccaaacagagcagtgggtgaaatgggtccctgggtgacatgtcagatctttgtacgtaattaaaaatattgtggcaggatt

SEQ ID NO: 25 - DNA, 412 bp, Homo sapiens
  ref <308>: DATABASE ACCESSION NUMBER: AI358246
  ref <309>: DATABASE ENTRY DATE: 2001-06-18
acttacaggtaactttttattggacattagatttgtctattggcaattaatataagcttgatcatatcttcacacttgagaagaaaacttccacttcagacaggtggaagccttatatgtagagaaaaaatgagaatcctacagagtctctggaccgttatctatcaaaagctttagcaggcggtttcctttcagcttttgatctctgtcaagagaagtctgtcagggagcaaattagcaggcaaatgcccttccaagttccttacttttgatctgtctctcctcagatagcatagatattggtttttaaggggaaaagttatacgaaaatgtgctgtttgtgtatttgaaatctactgagcctttctttaatcagaaaaaaaaaaatcattgttgctctctgtctttcctc

SEQ ID NO: 26 - DNA, 974 bp, Homo sapiens
  ref <308>: DATABASE ACCESSION NUMBER: X76538
  ref <309>: DATABASE ENTRY DATE: 2001-06-18
gtgggagggaggctcggcgctcaggaagcatggcactctggcgggcataccagcgggccctggccgctcacccgtggaaagtacaggtcctgacagctgggtccctgatgggcctgggtgacattatctcacagcagctggtggagaggcggggtctgcaggaacaccagagaggccggactctgaccatggtgtccctgggctgtggctttgtgggccctgtggtaggaggctggtacaaggttttggatcggttcatccctggcaccaccaaagtggatgcactgaagaagatgttgttggatcaggggggctttgccccgtgttttctaggctgctttctcccactggtaggggcacttaatggactgtcagcccaggacaactgggccaaactacagcgggattatcctgatgcccttatcaccaactactatctatggcctgctgtgcagttagccaacttctacctggtcccccttcattacaggttggccgttgtccaatgtgttgctgttatctggaactcctacctgtcctggaaggcacatcggctctaagcctgcctcactccatcgtttccaccttgcagtgatgcagcttgaccctggaacggtcagacaacctcctcaaagtgggcataccagtttccacggggttgggttgccggtcagagcttaagaggactagcacctgcaatgccctcttcactctaaatgtacactgactgctttagagcccttgataatagtcttattcccaccacatactaggcactccataaatatctgttgaaccttcatgaccttatcaactttacacccatatccagcaaatgccactcatccccactcttcatagacacatttgttactctaaccctgcctaggcttcttgtagctccagctctttagagactccgggaaccctttatatggtgcctcagtaaatatgttattaaatatgtaatccgg

SEQ ID NO: 27 - DNA, 1973 bp, Homo sapiens
  ref <308>: DATABASE ACCESSION NUMBER: Y12065
  ref <309>: DATABASE ENTRY DATE: 2001-06-18
ggatccggcaacgaaggtaccatggcgggacgtggcgccatggtgctgttgcacgtgctgtttgagcacgcggtcggctacgcgctcgtggcgctgaaggaagtggaggagatcagtctgctgcagccgcaggtggaggagtccgtgctcaacctgggcaaattccacagcatcgttcgtctggtggccttttgtccctttgcctcatcccaggttgccttggaaaatgccaacgccgtgtctgaaggggttgttcatgaggacctccgcctgctcttggagacccacctgccgtccaaaaagaagaaagtactcttgggagttggggatcccaagattggtgccgcaatacaggaggagttagggtacaactgccagactggaggagtcatagctgagatcctgcgaggagttcgtctgcacttccacaatctggtgaagggtctgaccgatctgtcagcttgtaaagcacagctggggctgggacacagctattcccgtgccaaagttaagtttaatgtgaaccgggtggacaatatgatcatccagtccattagcctcctggaccagctggataaggacatcaataccttctctatgcgtgtcagggagtggtacgggtatcactttccggagctggtgaagatcatcaacgacaatgccacatactgccgtcttgcccagtttattggaaaccgaagggaactgaatgaggacaagctggagaagctggaggagctgacaatggatggggccaaggctaaggctattctggatgcctcacggtcctccatgggcatggacatatctgccattgacttgataaacatcgagagcttctccagtcgtgtggtgtctttatctgaataccgccagagcctacacacttacctgcgctccaagatgagccaagtagcccccagcctgtcagccctaattggggaagcggtaggtgcacgtctcatcgcacatgctggcagcctcaccaacctggccaagtatccagcatccacagtgcagatccttggggctgaaaaggccctgttcagagccctgaagacaaggggtaacactccaaaatatggactcattttccactccaccttcattggccgagcagctgccaagaacaaaggccgcatctcccgatacctggcaaacaaatgcagtattgcctcacgaatcgattgcttctctgaggtgcccacgagtgtattcggggagaagcttcgagaacaagttgaagagcgactgtccttctatgagactggagagataccacgaaagaatctggatgtcatgaaggaagcaatggttcaggcagaggcagaggaagcggctgctgagattactaggaagctggagaaacaggagaagaaacgcttaaagaaggaaaagaaacggctggctgcacttgccctcgcgtcttcagaaaacagcagtagtactccagaggagtgtgaggagacgagtgaaaaacccaaaaagaagaaaaagcaaaagccccaggaggttcctcaggagaatggaatggaagacccatctatctctttctccaaacccaagaaaaagaaatctttttccaaggaggagttgatgagtagcgatcttgaagagaccgctggcagcaccagtattcccaagaggaagaagtctacacccaaggaggaaacagttaatgaccctgaggaggcaggccacagaagtcggtccaagaaaaagaggaaattctccaaagaggagccggtcagcagtgggcctgaagaggcggttggcaagagcagctccaagaagaagaaaaagttccataaagcatcccaggaagattagaatgcaaatggacattctctgggaggtggggcataccatagcccaaggtgacatttcccaccctgtgcccgtgttcccaataaaaacaaattcacaagaaaaaaaaaaaaaaaaaaaaaattcctgaggccgcaagggaattc

SEQ ID NO: 28 - DNA, 4264 bp, Homo sapiens
  ref <308>: DATABASE ACCESSION NUMBER: U28946
  ref <309>: DATABASE ENTRY DATE: 2001-06-18
atttcccgccagcaggagccgcgcggtagatgcggtgcttttaggagctccgtccgacagaacggttgggccttgccggctgtcggtatgtcgcgacagagcaccctgtacagcttcttccccaagtctccggcgctgagtgatgccaacaaggcctcggccagggcctcacgcgaaggcggccgtgccgccgctgcccccggggcctctccttccccaggcggggatgcggcctggagcgaggctgggcctgggcccaggcccttggcgcgatccgcgtcaccgcccaaggcgaagaacctcaacggagggctgcggagatcggtagcgcctgctgcccccaccagttgtgacttctcaccaggagatttggtttgggccaagatggagggttacccctggtggccttgtctggtttacaaccacccctttgatggaacattcatccgcgagaaagggaaatcagtccgtgttcatgtacagttttttgatgacagcccaacaaggggctgggttagcaaaaggcttttaaagccatatacaggttcaaaatcaaaggaagcccagaagggaggtcatttttacagtgcaaagcctgaaatactgagagcaatgcaacgtgcagatgaagccttaaataaagacaagattaagaggcttgaattggcagtttgtgatgagccctcagagccagaagaggaagaagagatggaggtaggcacaacttacgtaacagataagagtgaagaagataatgaaattgagagtgaagaggaagtacagcctaagacacaaggatctaggcgaagtagccgccaaataaaaaaacgaagggtcatatcagattctgagagtgacattggtggctctgatgtggaatttaagccagacactaaggaggaaggaagcagtgatgaaataagcagtggagtgggggatagtgagagtgaaggcctgaacagccctgtcaaagttgctcgaaagcggaagagaatggtgactggaaatggctctcttaaaaggaaaagctctaggaaggaaacgccctcagccaccaaacaagcaactagcatttcatcagaaaccaagaatactttgagagctttctctgcccctcaaaattctgaatcccaagcccacgttagtggaggtggtgatgacagtagtcgccctactgtttggtatcatgaaactttagaatggcttaaggaggaaaagagaagagatgagcacaggaggaggcctgatcaccccgattttgatgcatctacactctatgtgcctgaggatttcctcaattcttgtactcctgggatgaggaagtggtggcagattaagtctcagaactttgatcttgtcatctgttacaaggtggggaaattttatgagctgtaccacatggatgctcttattggagtcagtgaactggggctggtattcatgaaaggcaactgggcccattctggctttcctgaaattgcatttggccgttattcagattccctggtgcagaagggctataaagtagcacgagtggaacagactgagactccagaaatgatggaggcacgatgtagaaagatggcacatatatccaagtatgatagagtggtgaggagggagatctgtaggatcattaccaagggtacacagacttacagtgtgctggaaggtgatccctctgagaactacagtaagtatcttcttagcctcaaagaaaaagaggaagattcttctggccatactcgtgcatatggtgtgtgctttgttgatacttcactgggaaagtttttcataggtcagttttcagatgatcgccattgttcgagatttaggactctagtggcacactatcccccagtacaagttttatttgaaaaaggaaatctctcaaaggaaactaaaacaattctaaagagttcattgtcctgttctcttcaggaaggtctgatacccggctcccagttttgggatgcatccaaaactttgagaactctccttgaggaagaatattttagggaaaagctaagtgatggcattggggtgatgttaccccaggtgcttaaaggtatgacttcagagtctgattccattgggttgacaccaggagagaaaagtgaattggccctctctgctctaggtggttgtgtcttctacctcaaaaaatgccttattgatcaggagcttttatcaatggctaattttgaagaatatattcccttggattctgacacagtcagcactacaagatctggtgctatcttcaccaaagcctatcaacgaatggtgctagatgcagtgacattaaacaacttggagatttttctgaatggaacaaatggttctactgaaggaaccctactagagagggttgatacttgccatactccttttggtaagcggctcctaaagcaatggctttgtgccccactctgtaaccattatgctattaatgatcgtctagatgccatagaagacctcatggttgtgcctgacaaaatctccgaagttgtagagcttctaaagaagcttccagatcttgagaggctactcagtaaaattcataatgttgggtctcccctgaagagtcagaaccacccagacagcagggctataatgtatgaagaaactacatacagcaagaagaagattattgattttctttctgctctggaaggattcaaagtaatgtgtaaaattatagggatcatggaagaagttgctgatggttttaagtctaaaatccttaagcaggtcatctctctgcagacaaaaaatcctgaaggtcgttttcctgatttgactgtagaattgaaccgatgggatacagcctttgaccatgaaaaggctcgaaagactggacttattactcccaaagcaggctttgactctgattatgaccaagctcttgctgacataagagaaaatgaacagagcctcctggaatacctagagaaacagcgcaacagaattggctgtaggaccatagtctattgggggattggtaggaaccgttaccagctggaaattcctgagaatttcaccactcgcaatttgccagaagaatacgagttgaaatctaccaagaagggctgtaaacgatactggaccaaaactattgaaaagaagttggctaatctcataaatgctgaagaacggagggatgtatcattgaaggactgcatgcggcgactgttctataactttgataaaaattacaaggactggcagtctgctgtagagtgtatcgcagtgttggatgttttactgtgcctggctaactatagtcgagggggtgatggtcctatgtgtcgcccagtaattctgttgccggaagataccccccccttcttagagcttaaaggatcacgccatccttgcattacgaagactttttttggagatgattttattcctaatgacattctaataggctgtgaggaagaggagcaggaaaatggcaaagcctattgtgtgcttgttactggaccaaatatggggggcaagtctacgcttatgagacaggctggcttattagctgtaatggcccagatgggttgttacgtccctgctgaagtgtgcaggctcacaccaattgatagagtgtttactagacttggtgcctcagacagaataatgtcaggtgaaagtacattttttgttgaattaagtgaaactgccagcatactcatgcatgcaacagcacattctctggtgcttgtggatgaattaggaagaggtactgcaacatttgatgggacggcaatagcaaatgcagttgttaaagaacttgctgagactataaaatgtcgtacattattttcaactcactaccattcattagtagaagattattctcaaaatgttgctgtgcgcctaggacatatggcatgcatggtagaaaatgaatgtgaagaccccagccaggagactattacgttcctctataaattcattaagggagcttgtcctaaaagctatggctttaatgcagcaaggcttgctaatctcccagaggaagttattcaaaagggacatagaaaagcaagagaatttgagaagatgaatcagtcactacgattatttcgggaagtttgcctggctagtgaaaggtcaactgtagatgctgaagctgtccataaattgctgactttgattaaggaattatagactgactacattggaagctttgagttgacttctgaccaaaggtggtaaattcagacaacattatgatctaataaactttattttttaaaaatga

SEQ ID NO: 29 - DNA, 528 bp, Homo sapiens
  Modified_base 1 ... 528: n = a,c,g, or t
  ref <308>: DATABASE ACCESSION NUMBER: H23562
  ref <309>: DATABASE ENTRY DATE: 2001-06-18
ttttttttaggttttgctgctttatacacaggaatgatttattttacatactagtcagttacaacattagncctgtaaaatgaaatccattttttaaggtctcataaggcagaataaacttcataatattatgctttcacattagnccagtctgataaaggcataaacaacttaaggactatggtaacagtttaaaataaaatttacagnaacagggcactttgaagtcaggctactgtgtgtaacttcacagttaacgttacttggacatatctcatttcatcaaaggttatcacccagtgaagcaaatgttcctttgatgcagacgcacaaacagatttaggttccaaacactgtattctggttgtaatacatgcaagacagaccctaagttagaaaaatcttctgaaaggaaatgaaaaacaaaaagcagccagaaatgaaagcatttccaagccttgaataggctttcatgttaatngtgttttaaatccctcattccaggtaggggttngaggccggaggttt

SEQ ID NO: 30 - DNA, 937 bp, Homo sapiens
  ref <308>: DATABASE ACCESSION NUMBER: X67951
  ref <309>: DATABASE ENTRY DATE: 2001-06-18
gttcttgcctggtgtcggtggttagtttctgcgacttgtgttgggactgctgataggaagatgtcttcaggaaatgctaaaattgggcaccctgcccccaacttcaaagccacagctgttatgccagatggtcagtttaaagatatcagcctgtctgactacaaaggaaaatatgttgtgttcttcttttaccctcttgacttcacctttgtgtgccccacggagatcattgctttcagtgatagggcagaagaatttaagaaactcaactgccaagtgattggtgcttctgtggattctcacttctgtcatctagcatgggtcaatacacctaagaaacaaggaggactgggacccatgaacattcctttggtatcagacccgaagcgcaccattgctcaggattatggggtcttaaaggctgatgaaggcatctcgttcaggggcctttttatcattgatgataagggtattcttcggcagatcactgtaaatgacctccctgttggccgctctgtggatgagactttgagactagttcaggccttccagttcactgacaaacatggggaagtgtgcccagctggctggaaacctggcagtgataccatcaagcctgatgtccaaaagagcaaagaatatttctccaagcagaagtgagcgctgggctgttttagtgccaggctgcggtgggcagccatgagaacaaaacctcttctgtattttttttttccattagtaaaacacaagacttcagattcagccgaattgtggtgtcttacaaggcaggcctttcctacagggggtggagagaccagcctttcttcctttggtaggaatggcctgagttggcgttgtgggcaggctactggtttgtatgatgtattagtagagcaacccattaatcttttgtagtttgtattaaacttgaactgag

SEQ ID NO: 31 - DNA, 1100 bp, Homo sapiens
  ref <308>: DATABASE ACCESSION NUMBER: X62744
  ref <309>: DATABASE ENTRY DATE: 2001-06-18
ctaaagctgggttggtagctcctacctactgtgtggcaagaaggtatgggtcatgaacagaaccaaggagctgcgctgctacagatgttaccacttctgtggctgctaccccactcctgggccgtccctgaagctcctactccaatgtggccagatgacctgcaaaaccacacattcctgcacacagtgtactgccaggatgggagtcccagtgtgggactctctgaggcctacgacgaggaccagcttttcttcttcgacttttcccagaacactcgggtgcctcgcctgcccgaatttgctgactgggctcaggaacagggagatgctcctgccattttatttgacaaagagttctgcgagtggatgatccagcaaatagggccaaaacttgatgggaaaatcccggtgtccagagggtttcctatcgctgaagtgttcacgctgaagcccctggagtttggcaagcccaacactttggtctgttttgtcagtaatctcttcccacccatgctgacagtgaactggcacgatcattccgtccctgtggaaggatttgggcctacttttgtctcagctgtcgatggactcagcttccaggccttttcttacttaaacttcacaccagaaccttctgacattttctcctgcattgtgactcacgaaattgaccgctacacagcaattgcctattgggtaccccggaacgcactgccctcagatctgctggagaatgtgctgtgtggcgtggcctttggcctgggtgtgctgggcatcatcgtgggcattgttctcatcatctacttccggaagccttgctcaggtgactgattcttccagaccagagtttgatgccagcagcttcggccatccaaacagaggatgctcagatttctcacatcctgcccaggatctcctcttagggtagaagaagtctctgggacatccctggggtgtgtgtgtagatttcccacctggggactctgctgtccctgggcttgcatcccagggatcccagagtggcctgcctatcacaaccacatcccttccccccacaaggcaataaatctcatttctttaaaaaaaaaaaaaaaaaaaaa

SEQ ID NO: 32 - DNA, 670 bp, Homo sapiens
  ref <308>: DATABASE ACCESSION NUMBER: M36981
  ref <309>: DATABASE ENTRY DATE: 2001-06-18
cggccacgaggcggaatcccttctgctctcccagcgcagcgccgccgcccggcccctccagcttcccggaccatggccaacctggagcgcaccttcatcgccatcaagccggacggcgtgcagcgcggcctggtgggcgagatcatcaagcgcttcgagcagaagggattccgcctcgtggccatgaagttcctccgggcctctgaagaacacctgaagcagcactacattgacctgaaagaccgaccattcttccctgggctggtgaagtacatgaactcagggccggttgtggccatggtctgggaggggctgaacgtggtgaagacaggccgagtgatgcttggggagaccaatccagcagattcaaagccaggcaccattcgtggggacttctgcattcaggttggcaggaacatcattcatggcagtgattcagtaaaaagtgctgaaaaagaaatcagcctatggtttaagcctgaagaactggttgactacaagtcttgtgctcatgactgggtctatgaataagaggtggacacaacagcagtctccttcagcacggcgtggtgtgtccctggacacagctcttcattccattgacttagaggcaacaggattgatcattcttttatagagcatatttgccaataaagcttttggaagccgg

SEQ ID NO: 33 - DNA, 592 bp, Homo sapiens
  Modified_base 1 ... 592: n = a,c,g, or t
  ref <308>: DATABASE ACCESSION NUMBER: N30076
  ref <309>: DATABASE ENTRY DATE: 2001-06-18
cattttttaaaattttattactgtttaccaatggggagatgcagtttatttacaccagcagccataggggaaaggggaatacagttaatcagctatctgtataggatggactacttatgcaaaaataaaaatctccaaaacaaaggacagtggtgagcttcactaccctcccccgatgatcccagcatgcgataatgccaggcagtggtccctgggcatgcgatggtgggaactaatgtatggaagaaaaagccacaaaccacagaaattttaaagaacccccccttcccccataacacacacatacacacacacacacactcagatacataataggattgcagggtgatcaatacacataatcaagggaaaaataggaattctgctattnaaaaggaaggtaggtagggaaagggagagttccntaaccntggtcaactatatggtagggagcattctctcccccagaaaggagtatggtacctctgggcanctggttggaccaagcccaccttatacccatccagggcangaggctactgccctattggtagaggggccagaaacnaaaacaaaagggggtatntgacaa

SEQ ID NO: 34 - DNA, 828 bp, Homo sapiens
  ref <308>: DATABASE ACCESSION NUMBER: D45248
  ref <309>: DATABASE ENTRY DATE: 2001-06-18
gggggagtgaaagcgaaagcccgggcgactagccgggagaccagagatctagcgactgaagcagcatggccaagccgtgtggggtgcgcctgagcggggaagcccgcaaacaggtggaggtcttcaggcagaatcttttccaggaggctgaggaattcctctacagattcttgccacagaaaatcatatacctgaatcagctcttgcaagaggactccctcaatgtggctgacttgacttccctccgggccccactggacatccccatcccagaccctccacccaaggatgatgagatggaaacagataagcaggagaagaaagaagtccctaagtgtggatttctccctgggaatgagaaagtcctgtccctgcttgccctggttaagccagaagtctggactctcaaagagaaatgcattctggtgattacatggatccaacacctgatccccaagattgaagatggaaatgattttggggtagcaatccaggagaaggtgctggagagggtgaatgccgtcaagaccaaagtggaagctttccagacaaccatttccaagtacttctcagaacgtggggatgctgtggccaaggcctccaaggagactcatgtaatggattaccgggccttggtgcatgagcgagatgaggcagcctatggggagctcagggccatggtgctggacctgagggccttctatgctgagctttatcatatcatcagcagcaacctggagaaaattgtcaccccaaagggtgaagaaaagccatctatgtactgaacccgggactagaaggaaaataaatgatctatatgttgtgtgg

SEQ ID NO: 35 - DNA, 409 bp, Homo sapiens
  ref <308>: DATABASE ACCESSION NUMBER: AA448663
  ref <309>: DATABASE ENTRY DATE: 2001-06-18
agctttattgactattaccaactttcagtatggttcaaataattaaatactgcaactgggacattaaaaatacaagctaatttaccaaaataattgtattctgaatattatgtacaatattatacattttacattacataatgggtttttatacataaaggtaagatttctgattattggaaatacaaagtacaactgaacaaaacattcctatgcgtacatacacaatcactcaactggaacaatcaaaaccatctatgagtgtggttattaaaaaataaaattacgttcatacaatggtagaaaatgaaatgtttttattaatttgattattaatacaaaaccacacatatatgaattatataacctagtgttatatatttaaaaatctttatgcttgcaactgaaa

SEQ ID NO: 36 - DNA, 1792 bp, Homo sapiens
  ref <308>: DATABASE ACCESSION NUMBER: AB015907
  ref <309>: DATABASE ENTRY DATE: 2001-06-18
ggaagttaagggagtcaggggctatcgctcctcgagactcgcagtcgcggccactgcagtcacttcgccagttagcccttaggtaggagtcgcgccggcagcagccatgagcggcggcgtgtacgggggagatgaagttggagcccttgtttttgacattggatcctatactgtgagagctggttatgctggtgaggactgccccaaggtggattttcctacagctattggtatggtggtagaaagagatgacggaagcacattaatggaaatagatggcgataaaggcaaacaaggcggtcccacctactacatagatactaatgctctgcgtgttccgagggagaatatggaggccatttcacctctaaaaaatgggatggttgaagactgggatagtttccaagctattttggatcatacctacaaaatgcatgtcaaatcagaagccagtctccatcctgttctcatgtcagaggcaccgtggaatactagagcaaagagagagaaactgacagagttaatgtttgaacactacaacatccctgccttcttcctttgcaaaactgcagttttgacagcatttgctaatggtcgttctactgggctgattttggacagtggagccactcataccactgcaattccagtccacgatggctatgtccttcaacaaggcattgtgaaatcccctcttgctggagactttattactatgcagtgcagagaactcttccaagaaatgaatattgaattggttcctccatatatgattgcatcaaaagaagctgttcgtgaaggatctccagcaaactggaaaagaaaagagaagttgcctcaggttacgaggtcttggcacaattatatgtgtaattgtgttatccaggattttcaagcttcggtacttcaagtgtcagattcaacttatgatgaacaagtggctgcacagatgccgactgttcattatgaattccccaatggctacaattgtgattttggtgcagagcggctaaagattccagaaggattatttgacccttccaatgtaaaggggttatcaggaaacacaatgttaggagtcagtcatgttgtcaccacaagtgttgggatgtgtgatattgatatcagaccaggtctctatggcagtgtaatagtggcaggaggaaacacactaatacagagttttactgacaggttgaatagagagctgtctcagaaaactcctccaagtatgcggttgaaattgattgcaaataatacaacagtggaacggaggtttagctcatggattggcggctccattctagcctctttgggtacctttcaacagatgtggatttccaagcaagaatatgaagaaggagggaagcagtgtgtagaaagaaaatgcccttgagaaagagttcccaagcttctaccttccttttgtcaccttacgtttcatagctttagtatactcaggaaaagaatgaccatcttttgtagaatgtttatacatttttgcatatttcaatttccacttaaattttttaaagctttaactggctctataaattaagtttgtgctttccttgaaatgcacttattcttattacaagcattttataattttgtataaatgtctattttctctaaatattttgctttcagtaaaatgctttccaactctgtttagtgtattaattaccagtggattggtagaactgctttttattgactagtaaaagttactgcctatgctttttaccttaggcttacagaattaaataaaaattagccattccagaaatat

SEQ ID NO: 37 - DNA, 1173 bp, Homo sapiens
  ref <308>: DATABASE ACCESSION NUMBER: X06994
  ref <309>: DATABASE ENTRY DATE: 2001-06-18
aggccaagatggcggcagctgcggcttcgcttcgcggggtagtgttgggcccgcggggcgcggggctcccgggcgcgcgtgcccggggtctgctgtgcagcgcgcggcccgggcagctcccgctacggacacctcaggcagtggccttgtcgtcgaagtctggcctttcccgaggccggaaagtgatgctgtcagcgctgggcatgctggcggcagggggtgcggggctggccgtggctctgcattcggctgtgagtgccagtgacctggaggtgcacccccccagctatccgtggtctcaccgtggcctcctctcttccttggaccacaccagcatccggaggggtttccaggtatataagcaggtgtgcgcctcctgccacagcatggacttcgtggcctaccgccacctggtgggcgtgtgctacacggaggatgaagctaaggagctggctgcggaggtggaggttcaagacggccccaatgaagatggggagatgttcatgcggccagggaagctgttcgactatttcccaaaaccataccccaacagtgaggctgctcgagctgccaacaacggagcattgccccctgacctcagctacatcgtgcgagctaggcatggtggtgaggactacgtcttctccctgctcacgggctactgcgagccacccaccggggtgtcactgcgggaaggtctctacttcaacccctactttcctggccaggccattgccatggcccctcccatctacacagatgtcttagagtttgacgatggcaccccagctaccatgtcccagatagccaaggatgtgtgcaccttcctgcgctgggcatctgagccagagcacgaccatcgaaaacgcatggggctcaagatgttgatgatgatggctctgctggtgcccctggtctacaccataaagcggcacaagtggtcagtcctgaagagtcggaagctggcatatcggccgcccaagtgaccctgtccagtgtctgcttgccatcctgccagaacaggccctcaagcccaagagccatcccaggcctgttcaggctcagctaagcctctcttcatctggaagaagaggcaagggggcaggagaccaggctctagctctgggccctccttcagcccccatcatgggaataaattaattttctcaatgt

SEQ ID NO: 38 - DNA, 540 bp, Homo sapiens
  ref <308>: DATABASE ACCESSION NUMBER: AA987540
  ref <309>: DATABASE ENTRY DATE: 2001-06-18
ccccttacagacaaaatgaagactatcatgtgcaatcttttacagtggggttgatgatacatttggaaggatttgcttgtttaatatgtacattttttgtgttaacagctttttgacacaattactgggtaatttctaatataggcagcagactgttttacgggttgctgttttaacatgggtttttgtcagatccatggtcttaggacttgactgatgagctttcagtgaagaatcctctaagataaaacttctatttaaagactttaactagaaagtgtttattttggctacattgttcaccttctgctgtattggtatttgtctgttgggatttcaagggagtgtagagaagacagaaggaaagctgagagctggcccgacatggtctgggacacagagttggagctggcactgaagatctccagggacttcagagaccaataaaagcccatagggaagagagagaggatatagggaaacagaatcagatgtgtaatatacttggcacagcgaaaaaatggatttaaaagacaaaaa

SEQ ID NO: 39 - DNA, 6034 bp, Homo sapiens
  ref <308>: DATABASE ACCESSION NUMBER: X85545
  ref <309>: DATABASE ENTRY DATE: 2001-06-18
ccacgcgtccggagctggaggaggcggcgggcgcgagacccggaatgcgcagggcccccgcctcgccccccccagcccgggccgcggcccccgccttccccgcagtcgtcccgcactcggtgcccgccccccgaggccggcggctgctcccactcggggccgttgctgcttgtgccgtgagcgccgcccagccattgtccccgtcgctccgtcagccgcgccggaccgcgcaccaggaggcgagagcgcgcatggggagcctctgttgatgccgccgccgcgccgccctccgaggctgcgtcccgggaagcccggctccccgagcgctccggcctggcccggtgccccggacctgagtgcgtccccatggaggcgcccgggctggcccaggcggccgcggcggagagcgactcccgcaaggtggcggaggagacccccgacggggcgcccgcgctctgccccagccctgaggcgctgtcgccggagccgcctgtgtacagcctgcaggactttgacacgctggccaccgtgggcactgggacgttcgggcgggtgcacctggtgaaggagaagacagccaagcatttcttcgccctcaaggtgatgagcattcctgacgtcatccgcctaaagcaggagcaacacgtacacaatgagaagtctgtcctgaaggaagtcagccacccgttcctcatcaggctgttctggacgtggcatgacgagcgcttcctctacatgctcatggagtacgtgccgggcggcgagctcttcagctacctgcgcaaccgggggcgcttctccagcaccacggggctcttctactctgcagagatcatctgtgccatcgagtacctgcactccaaagagatcgtctacagggacttgaagccagagaacatcctgctggatagggatggccacattaagctcacggactttgggttcgccaagaagctggtagacaggacttggaccctctgtggaacacccgagtacctagcccccgaagtcattcagagcaagggccacggaagggccgtggactggtgggccctcggcatcctgatattcgagatgctttcggggtttcctccgttttttgatgacaacccgtttggcatttatcagaaaattcttgcaggcaaaatagatttccccagacatttggatttccatgtaaaagacctcattaagaaactgctcgtggttgacagaacaaggcgattaggaaacatgaagaacggggcgaatgatgtgaagcatcatcggtggttccgctccgtggactgggaagctgttccgcagagaaaactgaagcctcccatcgtgcccaagatagctggtgacggcgacacttccaacttcgaaacttaccctgagaatgactgggacacagccgcgcccgtgccgcagaaggatttagaaatcttcaagaatttctgaggacaggagctcacatctggaagaaacaggaagattggaatctgcctggaacaaagaactgcacctaagcagaccagaagcaaaatgtcttcttcacggcataaggacatctccacttttctctgtacctgtgtgtatagaaatagattagagcacagttgaaattcatggaactggcattatttaagcaactggaattccacactgtaggaaggttttgaaaattgtttggttgtagattttatcttatcctttagtgttgtgttcctactgtgatgtcttggtttttgtcatagacttaagtttataagtttgaactggacttgttcgattataaccacaaattgtgtgtgtgtgtgtgtgtgtgtgtgtgtgtgtgtgtatgcctgtgtgtatatatagaagtcattatggcagatgcacagaaattgtgcagtgatgtaaatgttcatactttacagagcctataatttttatttttcaatttgttttttcaaaaatctcttctcggggacaacatctgaagggtatgttgcatgcattaaaaaaaatcatctcacatgcattttatagttttggggaagaaaatatcatggggaggtctaccttcagtatctttagttcttcttaccgggtaacttgagactttaaaagaagaaacaaagaggggaagatatgggagcgaatttattccaagaatctacaatgacattgaagttgttggaggaatgtactgtatttaaaaaaaccttctgtgacacattcaaaaatttcatctgagctggatgcagtggcttgttcctatagtcccagcactttgggaggctgaggtgggtggattgcttgagcccaggagttggagaccagtctgggaaacgtggtgagacctcatctctacaaaatacaaaaaaattagccgggcatggtggcacgtgagttaggtctcagctactcaggaggctgagatgagaggatcacttgagcctggggaggtccaggccgcagtgatccgagatcacaccactgcattccagcctgggtgacagagtgagaccctgtccaaaaaaaaaaaaaaaaaaaagaaggcaatggctttgtgcttttgaagatggattgaagagaacgtccaccttaaggctttaaaagacagtgaagctgggtgcggtggtgcactcctgtaaccctgggactttgggaagctgaggcaggaagattgagcctaggagttcgagactgacctgggcagcatagcgagaccccatctctatataaaaaaaaagatgttaaaacagtgaaattacagaaacagaacatagccaccctttttcatcagtgaccttttcttcacgtggaggtcaactcagtaggtgagaataattagtaggttcagcagaataaactctttacaattaataactcagtggaaaatgatgttcagatggtgaaatgtggaaatgttttagacaactctattttcagcctgtgcttctcactcaccatcctgttgggattaacagttgagggccatcgctgcctaaacatttagcgtgcggtttcccatcagttttaccgtgaatgtgaaaaggtgaaactggtgctgacttcggcagcaggtatactaaaattggaatgacacagaggagattagcatggccccctgcgcgaggaagatctgcagattcatgcagcattccatatttttttaagaaaaggttacactgtgcaccgacatgtggagctagaaggaaaagcttttaagtctcatgtttgctgactataaaaataaatcatagtaataatattgaacattctactttaaaaattattaataaaaccataaatgaaacacttgagcacactttaaaaagtacataaatccatgagtccatatgcctatttttaggttgtctgttttattatccaggatttcatactcagatgagaattagcatcaggaaagcctgaaatgccttaattgtgaactgatatgcaggaaaatgaaatatgcaagcacattggtgaccttgttctttacagacgtcgtgatcagcctccagccatacagaacaaatgagaaattagaagcgattccaagaacgtgtgatggtgtgaacccactttggaccatcacacacatttcagcatttgaagtgacacaagctacctggtaactgcccatggcggggtcatagtttaaatggcccaatgtcatgtagaggttaatttaatcaaaatgagctataaacatggagcaatcactgtataattttaaaatagtttacctggccaggcatggtcgtcacgcctgtaatcccagcactttgggaggccgaggcaggtggatcacctgaggtcaggagttcgagaccagcctggccaacatggcaaaacccccgtctctactaaaatacaaaaattaggtgtggtggcgggcacctgtaatcctggctactcgggaggctgaggcaggagaatcgcttgaacccgggaggcagaggctgcagtgagccgagatcgtgccactgcactccagcctgggccacagagcaagactccgtctcaaaacataaaaataaaaaaaatacaaatagctgacccgggtgggcattccaaaatgtccgcatggacgatcacgaaacaatcacggtgcgaaatgtccgcatggatgatcacgaaacaatcacggtgcggaatgtccgtatggatgatcatgacaaacaatcactgcgcaaaatgtggaggaaaattcattaccataatcacaacatttgtatcagaaaaacattacaaatttactttgcttcatgtaattttacgagttggcaatattttcttaaattggaatactctaagagaataggacatggatatgttacaagaagaagtgtattggggcaagtcttgtttttctgaagggaaatgccaccggcctgctttcataggcattgataaagccaggaaggaaataaagtcacaaccaaatagtatacactgtctctactgaattcttctaattccttcgcaacagaagtctaaatcctgcttagcctaaacatatctatagccagcgatgggcaaattatatttgctgtcagcatgatagaataagaagcagaaaccccccagcagtggggtaagattgcgcgcttcatcccctcaaaatgcagctcagccccactccctctccatgcccatcaaacaactgcacaatcacttgttactgaatttcccattcagcgttttgtttctttctgtccatacttaaagaccaaatcatttgtttgctttgaagaaaaagcaaaaacaagaacaaaaacaccaaatcatttgaaatcactgtccattaaaaaaaatcaccagtggaactaaacagttgagtggtttgggatgtgttcgccatttctgtgtttgacctacatggcctgtaattctttggaccattgtaactgtgaactatggcttaatactgttaaagaccccaaggctccactctgtagccaggtgcacctcaggctgcacaaataccccaccagaatgtcacaatcattcattgctccagctactgagtgaacagggtgcaagacagcactggcttgggttgtatttttgcagccagttaactttgcatcaggtctacacagtccttgcagcctttgatttctccagttgtagagatttgaaatggggtgcccgggttgctctcgtttttccttcaagctacctagcatgcattttacacacattggaggagtcgtatgcactgtttttctgttgctgatggaggcaagcaggccttctaattagtctaagttaaacggatgggattcacttaagaaaagcaagaagaaaagcacacgaacaggtgtcttaatgcatttggatagtttctttgcggggtgtgtgtgtgtgtgtgtgtgtgtgtgtgtgtgtgtgtgtcttggtgaaggtgaggggctgtattttcaccaagccttttcataatcaagtttgctttgcaaaccttatggccttgcaccccgcagaacagtcccttcctaatagcagggatgctctgtcatggtttttctgtaaattatcgtgtgttgggaagttctgttgaggcttagtttgatcttccatggtggacacgtctgttctgtatgtaaaaggcattacaattgtgttttagcagatgagacttgaagcctttccacagtccttgtgctctgagatggctgttgagctctgctcaactgtcgtagctgaattctttctttgcgctgaacactgggcagcctcaccatgttgccaacgtgcttctggggcccctgtcactgccgctggatgccgcgcacacaggcagagtgccttggcaggtttgtgcaccccttggcgagccagaactgggaaccccgcggggtgaccccttctcatggggggtcggggaggggagtgcctatttttaatcctgtctgtttgttgcacaatggaaatcactgtgatttgtacatatgccctaggaaaattttactgctgtctaatttatgtaataatactgttgattccaggtttatttaataaaactttgtatcttttcagaaaaaaaaaaaaa

SEQ ID NO: 40 - DNA, 3112 bp, Homo sapiens
  ref <308>: DATABASE ACCESSION NUMBER: J04031
  ref <309>: DATABASE ENTRY DATE: 2001-06-18
gtggaacctcgatattggtggtgtccatcgtgggcagcggactaataaaggccatggcgccagcagaaatcctgaacgggaaggagatctccgcgcaaataagggcgagactgaaaaatcaagtcactcagttgaaggagcaagtacctggtttcacaccacgcctggcaatattacaggttggcaacagagatgattccaatctttatataaatgtgaagctgaaggctgctgaagagattgggatcaaagccactcacattaagttaccaagaacaaccacagaatctgaggtgatgaagtacattacatctttgaatgaagactctactgtacatgggttcttagtgcagctacctttagattcagagaattccattaacactgaagaagtgatcaatgctattgcacccgagaaggatgtggatggattgactagcatcaatgctgggagacttgctagaggtgacctcaatgactgtttcattccttgtacgcctaagggatgcttggaactcatcaaagagacaggggtgccgattgccggaaggcatgctgtggtggttgggcgcagtaaaatagttggggccccgatgcatgacttgcttctgtggaacaatgccacagtgaccacctgccactccaagactgcccatctggatgaggaggtaaataaaggtgacatcctggtggttgcaactggtcagcctgaaatggttaaaggggagtggatcaaacctggggcaatagtcatcgactgtggaatcaattatgtcccagatgataaaaaaccaaatgggagaaaagttgtgggtgatgtggcatacgacgaggccaaagagagggcgagcttcatcactcctgttcctggcggcgtagggcccatgacagttgcaatgctcatgcagagcacagtagagagtgccaagcgtttcctggagaaatttaagccaggaaagtggatgattcagtataacaaccttaacctcaagacacctgttccaagtgacattgatatatcacgatcttgtaaaccgaagcccattggtaagctggctcgagaaattggtctgctgtctgaagaggtagaattatatggtgaaacaaaggccaaagttctgctgtcagcactagaacgcctgaagcaccggcctgatgggaaatacgtggtggtgactggaataactccaacacccctgggagaagggaaaagcacaactacaatcgggctagtgcaagcccttggtgcccatctctaccagaatgtctttgcgtgtgtgcgacagccttctcagggccccacctttggaataaaaggtggcgctgcaggaggcggctactcccaggtcattcctatggaagagtttaatctccacctcacaggtgacatccatgccatcactgcagctaataacctcgttgctgcggccattgatgctcggatatttcatgaactgacccagacagacaaggctctctttaatcgtttggtgccatcagtaaatggagtgagaaggttctctgacatccaaatccgaaggttaaagagactaggcattgaaaagactgaccctaccacactgacagatgaagagataaacagatttgcaagattggacattgatccagaaaccataacttggcaaagagtgttggataccaatgatagattcctgaggaagatcacgattggacaggctccaacggagaagggtcacacacggacggcccagtttgatatctctgtggccagtgaaattatggctgtcctggctctcaccacttctctagaagacatgagagagagactgggcaaaatggtggtggcatccagtaagaaaggagagcccgtcagtgccgaagatctgggggtgagtggtgcactgacagtgcttatgaaggacgcaatcaagcccaatctcatgcagacactggagggcactccagtgtttgtccatgctggcccgtttgccaacatcgcacatggcaattcctccatcattgcagaccggatcgcactcaagcttgttggcccagaagggtttgtagtgacggaagcaggatttggagcagacattggaatggaaaagttttttaacatcaaatgccggtattccggcctctgcccccacgtggtggtgcttgttgccactgtcagggctctcaagatgcacgggggcggccccacggtcactgctggactgcctcttcccaaggcttacatacaggagaacctggagctggttgaaaaaggcttcagtaacttgaagaaacaaattgaaaatgccagaatgtttggaattccagtagtagtggccgtgaatgcattcaagacggatacagagtctgagctggacctcatcagccgcctttccagagaacatggggcttttgatgccgtgaagtgcactcactgggcagaagggggcaagggtgccttagccctggctcaggccgtccagagagcagcacaagcacccagcagcttccagctcctttatgacctcaagctcccagttgaggataaaatcaggatcattgcacagaagatctatggagcagatgacattgaattacttcccgaagctcaacacaaagctgaagtctacacgaagcagggctttgggaatctccccatctgcatggctaaaacacacttgtctttgtctcacaacccagagcaaaaaggtgtccctacaggcttcattctgcccattcgcgacatccgcgccagcgttggggctggttttctgtaccccttagtaggaacgatgagcacaatgcctggactccccacccggccctgtttttatgatattgatttggaccctgaaacagaacaggtgaatggattattctaaacagatcaccatccatcttcaagaagctactttgaaagtctggccagtgtctattcaggcccactgggagttaggaagtataagtaagccaagagaagtcagcccctgcccagaagatctgaaactaatagtaggagtttccccagaagtcattttcagccttaattctcatcatgtataaattaacataaatcatgcatgtctgtttactttagtgacgttccacagaataaaaggaaacaagtttgcca

SEQ ID NO: 41 - DNA, 620 bp, Homo sapiens
  Modified_base 1 ... 620: n = a,c,g, or t
  ref <308>: DATABASE ACCESSION NUMBER: AA142859
  ref <309>: DATABASE ENTRY DATE: 2001-06-18
cgaatacaaagttatatttattttcaacaatgaaaacaacacaacaaagtggagtcaatccactaattttttaaatctaacacaatgcttagcacaaacaatactcaataaataacacattaaccaagtaacattattcttaacactctctagagttgtgtgcgcgttttaaggaaaactgaggggtaggtaaagaaagacatccggcagacttgactgagaagggctccaaaaaaagaacagccaaagagcagggtacccaaatactaagttagcaaaatgaatacagcattttcaaagcagtctagaaatcagagctcactgggggaaatgacaagggtttggggataatccgtgttcaaggcctcataattaaatcttctcctatttctagattcttatttggaatctatcccaatctaaaggagcttctgccaaaggacaggagattacttatgctgccgaaatggcctatgcctcctaaatttccttcacttgtcactactatagcagggttccttccacatggttactactatgtagaccactccgtctgattagatctccttctaacacntgtactgttcaggacgctgtaatactccattctttctttatcc

SEQ ID NO: 42 - DNA, 1545 bp, Homo sapiens
  ref <308>: DATABASE ACCESSION NUMBER: U20536
  ref <309>: DATABASE ENTRY DATE: 2001-06-18
ccgagggcggggccgggcccgggagcctgtggcttcaggaagaggagggcaaggtgtctggctgcgcgtttggctgcaatgagctcggcctcggggctccgcagggggcacccggcaggtggggaagaaaacatgacagaaacagatgccttctataaaagagaaatgtttgatccggcagaaaagtacaaaatggaccacaggaggagaggaattgctttaatcttcaatcatgagaggttcttttggcacttaacactgccagaaaggcggcgcacctgcgcagatagagacaatcttacccgcaggttttcagatctaggatttgaagtgaaatgctttaatgatcttaaagcagaagaactactgctcaaaattcatgaggtgtcaactgttagccacgcagatgccgattgctttgtgtgtgtcttcctgagccatggcgaaggcaatcacatttatgcatatgatgctaaaatcgaaattcagacattaactggcttgttcaaaggagacaagtgtcacagcctggttggaaaacccaagatatttatcatccaggcatgtcggggaaaccagcacgatgtgccagtcattcctttggatgtagtagataatcagacagagaagttggacaccaacataactgaggtggatgcagcctccgtttacacgctgcctgctggagctgacttcctcatgtgttactctgttgcagaaggatattattctcaccgggaaactgtgaacggctcatggtacattcaagatttgtgtgagatgttgggaaaatatggctcctccttagagttcacagaactcctcacactggtgaacaggaaagtttctcagcgccgagtggacttttgcaaagacccaagtgcaattggaaagaagcaggttccctgttttgcctcaatgctaactaaaaagctgcatttctttccaaaatctaattaattaatagaggctatctaatttcacactctgtattgaaaatggctttctcagccaggcgtggttactcacacctgtaatcccagcactttgggagtccaaggtgggcggatcacctgaggtcgggagttcgagaccagcctgaccaacatggcagaagccccgcctctactaaaaatgcaaaaaaaaatttagctaggcatggcggcgcatgcctgcaatcccagctacttggaaggctgaggcaggagaatcacttgaacccaggaggtggaggctgcggtgagccgagcattgcgccattgcactccagcctgggcaacgagtgaaactccgtctcaaaaaaaaagaaaatgtctttctcttccttttatataaatatcgttagggtgaagcattatggtctaatgattcaaatgttttaaagtttaatgcctagcagagaactgccttaaaaaaaaaaagttcatgttggccatggtgaaagggtttgatatggagaaacaaaatcctcaggaaattagataaataaaaatttataagcatttgtattattttttaataaactgcagggttacacaaaaatct

SEQ ID NO: 43 - DNA, 1803 bp, Homo sapiens
  ref <308>: DATABASE ACCESSION NUMBER: X95632
  ref <309>: DATABASE ENTRY DATE: 2001-06-18
gataagcttgatatcgacttcgtgttcctgggtttccttggcgctgcggccgccgctccctctgcaactgtatgaggaggaggaggaggaggatgtgaagatggcggagctgcagatgctgctggaagaggaaatcccgggggggcgccgggccctcttcgacagatacacaaatctggaacgggtggccgattactgcgagaacaactacatacagtcagcagataagcagagagccctagaagaaaccaaagcctacaccacccaatccttagcaagtgttgcctatctgataaacaccttggacaacaatgtcctgcagatgctggatatccaggcatcccagctacgaaggatggaatcttcaatcaatcatatttcacaaacagttgatattcataaagagaaagttgcaagaagagaaattggtattttgactaccaataaaaacacttcaaggacacataagattattgctccagccaaccttgaacgaccagttcgttatattagaaaacctattgactatacaattctagatgatattggacatggagtaaaggtgagtacccagaacatgaagatgggtgggctgccgcgtacaacacctccaactcagaagccccctagtccccctatgtcagggaaagggacacttgggcggcactccccctatcgcacactggagccagtgcgtcctccagtggtaccaaatgattacgtacctagcccaacccgtaatatggctccctcgcagcagagccctgtgaggacagcttctgtgaatcaaagaaatcgaacttacagcagcagtgggagtagtggagggagccacccaagtagtcggagcagcagtcgagagaacagtggaagtggtagtgtgggggttcctattgctgttcctactccatctcctcccagtgtctttccaggtcatcctgtacagttctacagcatgaataggcctgcctctcgccatactcccccaacaatagggggctcgttgccctatagacgccctccttccattacttcacaaacaagccttcagaatcagatgaatggaggacctttttatagccagaatccagtatctcttgctcctcctcctccctccatcctacaggtaactcctacgttacctttaatgggatttgtggccagagtccaagaaaatatttcagatacaccacctccaccgccacctgtggaagaaccagtctttgatgagtctcccccacctcctcctcctccagaagattacgaagaggaggaagctgctgtggttgagtatagtgatccttatgctgaagaggacccaccgtgggctccacgttcttacttggaaaaggttgtggcaatttatgactatacaaaagacaaggaagatgagctgtcctttcaggaaggagccattatttatgtcatcaagaagaatgacgatggttggtatgagggagttatgaatggagtgactgggctttttcctgggaattacgttgagtctatcatgcattattctgagtaaagctcagcagggctgtgcttggctcacaggaatagtcaggtcttcccagattatctgaaggccctggggattccactccagtaaagtagaatgaaggatacaaatgataaaaattacactttttttttgggttattccccagtattaaaaacaaagcaagctgagtctgaacaaatggatctttctgccatcatttgtacaatgctgagctgtctggattgaaataaaatgaccatttttatgtatgtcaaaggtaaaaaaaaaaaaaaaaaaaa

SEQ ID NO: 44 - DNA, 6632 bp, Homo sapiens
  ref <308>: DATABASE ACCESSION NUMBER: AB007917
  ref <309>: DATABASE ENTRY DATE: 2001-06-18
ggcgagagcccggcagccgcttcgcgctgtttgctgcgcgggcttttggagggggcggccgtttagtcggctgaggagaagcggacaccagcggcgttggtgatagcgcctgggggagggggactggagaggcgagaaggggggtcgctgcggtggttctctcgctgtcgctctctctttgcctcgctcccggctcggcgggctcctcccggcgtctctctcgcctccggggtcccgctccccgccccccgcggtatgtcttgatcccgagcagcgggtttcatggggctcctcaggattatgatgccgcccaagttgcagctgctggcggtggtggccttcgcggtggcgatgctcttcttggaaaaccagatccagaaactggaggagtcccgctcgaagctagaaagggctattgcaagacacgaagtccgagaaattgagcagcgacatacaatggatggccctcggcaagatgccactttagatgaggaagaggacatggtgatcatttataacagagttcccaaaacggcaagcacttcatttaccaatatcgcctatgacctgtgtgcaaagaataaataccatgtccttcatatcaacactaccaaaaataatccagtgatgtcattgcaagatcaggtgcgctttgtaaagaatataacttcctggaaagagatgaaaccaggattttatcatggacacgtttcttacttggattttgcaaaatttggtgtgaagaagaaaccaatttacattaatgtcataagggatcctattgagaggctagtttcttattattactttctgagatttggagatgattatagaccagggttacggagacgaaaacaaggagacaaaaagacctttgatgaatgtgtagcagaaggtggctcagactgtgctccagagaagctctggcttcaaatcccgttcttctgtggccatagctccgaatgctggaatgtgggaagcaggtgggctatggatcaagccaagtataacctaattaatgaatattttctggtgggagttactgaagaacttgaagattttatcatgttattggaggcagcattgccccggtttttcaggggtgctactgaactctatcgcacaggaaagaaatctcatcttaggaaaaccacagagaagaaactccccactaaacaaaccattgcaaaactacagcaatctgatatttggaaaatggagaatgagttctatgaatttgcactagagcagttccaattcatcagagcccatgccgttcgagaaaaagatggagacctctacatcctcgcacaaaactttttctatgaaaagatttaccctaagtcgaactgagtataaggtgtgactattagattcttgaactaaaatttgaccctgtcttcacctttgttctcagctccacagtctggattgctgacagtaggtgtatatgacaatttgtattgagccaaattaggaaacagacagtaacgtcaaggaagtagatactggctggcattgtcagtgttctaagtttcaggcatttttatttttcctggctaaacgttggtgaaagttataacctcctgcctgggagaaaatatacatcacctaaaatgaacttatggcaggtctaatcaaaaggctaaatacaatttcagaaaaggttctgatactcttgtttttgataaagcattttttcaactaaccatgaattaagatgagtccatttgcctcttctgccttcactgagggtttgggttatacacctctactgaattgtgttaataactgtttggcagtgtgtactttgtttttgtgagtcatgtctcatgaaatttattggaatgtttaatcatatttgctaagaaatgtttctgctgtagttggatttgcccatatttatgtaggtggttttaattttttaaatggtgattagtgttaaaaatcaatttaaatcatgactaatatggtaaaaagataaagcatcaaagcagtatttctcattcctgcctcctcaatatctaatactgggaagatacttcaaagaatattgagattgtctgaagttttagttaagattttcacacattaatatcaaaaaagtaagtttagtatttgtttctccatgggttatttgtaaagctgtaaactgagatatcggtgactccgtattatgactccattagtgagctgtggtatgggtaggattttcctacttcttctgtacttttacctgtagactatttttactaaggtgctttataatgtgttttaaagcattgcatttacaaaacaaggaaaatgctgtaaatattgcatattttatgtatttggaccaaaaggttacaagtaattagacaaaagtggttttgcaccaattttatgtcaagtaaaaccatcagacctactgttcttgtatttctcatttaactttactgttaagacatcactgaaatgaacttcagtaagctttcaattttgatacacagttcattattcataacttgaggcagtaattacagtggaatgagtactggacaaggagtcaaaaaacttgatttcaggtcctagctctagcacttacagctgtgtgatcttgggcaagtcacttaacctctctttgcctcaatttcctcatcttgaaatgaggataataatacctgctgtacctacctcacagggctgttgtgaggattaaatgagatggcatgtgaaagcactttgaaaattgtaaagcgctatgtaaatgtaaggtattatagaaacatctttaacatatagtttcataccattcattttttaacaaagaaagggaaaagtctgcttgtaagctggttgaaaaagttaatcttgatataaatttgtgtttgataaatatcctctcagtgttttatcttccatgtttcaacaactattgaaatatgaaatgcctgtgaactcttaaagcttcatgagcagctgcttgagttcaggaagttcactgttagaaataggctttgttagctgactagggtcagggaaacttttctcttcaaatttgaaagctgtttctgttttcattttacattattattcagaaatggtagctattctatacctatggtttaagtaaatatttctgaataaggcttcaccatactgtaagcattttaggtagattgccttaaaggttatgggagggcatgagggaacacttcttatgagaaaacatttataaacaaaagaaacatttataaactaaagaaaaactaaaagaatgacagaacaatcatcttagcaccctttcctcacaataatataaaaatattaaaagaacataggcaggctttttttaaatttggcttttttctttccttttttcaaattgacttttataggtatttcctgaaagtgtatacaaattatttcctcgcccaaaataaagcaccacttcaaggtgtggtttgacattacatgctaatgaacaaacccagtatgcaagttattcttgcaccacatgctcaaatcttcttgaggtgcattaactcttttaggtaactagagcagtacttggtgaactagatcaggaggtcagtaaactttctgtggaagggccagagagtaaatattttaggctttgcagcccatacggtctctgtcacagctagtcaaccctgccattttaccacaaaagcagcaatagacattatgtaaacaaatgagcacagttatgttccaataaaactttatttacaaaaacagatgacatcccagatgcagaccatgggcaaccaaccattgcactggctaaatcattatttatggagaaatcctctttgtgtctctactctagatgcctaaaagagtttatatacttctaaaagctcctaacttatatccaaagaattgctttctgattcgtgtagtctctcccacagattcataaacttttatgacttatattgtttccaggtgggcatggtttatttcccagtttaacagttcagaataggggcatttattttatcatattttagggtgggttaggagtatcctttctggagactgagaaaggggtgtatttaattccatcaggtccagtacagtactaggagtcataatactttataatcaattaaataaatagaaccactgagacaataatgtatttttttaaagtggcaaatgtggttttcttttttcagcctttgcgctttttcagtattttgaccatagggagataatttttttataatacaaaagtaaccacttggaattttaaagataatgttatgtgtgtatgtgaaatatatatacatatatatatatatttcctaaaagaagaaaagatacctttctgttcaacttgtatcaactcctcttttctaattgctgtgaaatggcaactgttgataaattattgtgattgttttaaaatctaatgggaagtaaaatatattttgattttacccagcttaatctgtaaagtagcacttaaatatatctgatagcaacacttaagatattgcatggggattactttcctatcatccatatgcatttgtgcaacttcaaacatattgggtgcttctgaattcctgatgattggatttaagctattgaaaattggataatttaaacttaatgatttttataattttctgatcttaaaatttggttaatgcctataatctgttgctttttctcaatatgtgtcctattggaaattcctcaaatcgttggtgccatcagtgatttacaaacaatattttgatattgcagatgacttgcttactgtatttgcattgttagaaaacagtttgtagacaatgattcttttttaataaaatcaaataattctaaaagtgctagagaatttaactaaaagctggttcccaaatgcatagctggcattttaatttaaattcaaatctacatagagaacatccgtgtaaatcatctaactggattttcccattggtcattcccaaacacacctatggtcctagaatccttaagagaagcaccctgtaaccttttatgtggtttgcctttaagaggcccaggtgcttctcctttatgatttgagttggcctcttcataaattagtgctgtttactttcagaggaagcagagaagttgctgttatgtttttgcatccgtttaccctatgcaaagttgctgtatgatgccaactaaactgctctttaggcagccttctgaggagaaaagcaaccctgtttcaaatccactgccaattcagctcctctggagtggagctttctgatttcttggagcaggaattttagagattgaaatgaatgatcatttagtcagatttatcctgtaatttcatgcagctttgtggcctttgcagtactatttataaaatggaccctgatggtgatgaactctttagaacgcattactgttaagcctgtgttgagacattgatgctgtctatctcattttttagacagtttttgtagctttctattgagagtcaggtatgtgagcatctctgaagcagtgttgaatgtaattttcggaaacatggattgtgtattttgacttttattttataaatacacagctcaacagtgccttttttttccctcatagtcctgttggaagatgctcactactttctctcttctctctccctgccctcccccactccattcagttgattcatttatgcaaattctgtttccaacttgaaaccattttgtcacatctgttggagagataatcactccttttccttaacattctgccagctttctgatgttgaagtgtttcagttgactacctgatgcaaaagctataaaataaacagtgggaaggggaaaaattggtgtcctgttttaatattttcttttgtagccttgacactgatggacattttccaagctgactcagtgttcagtgtcaacttaactctcagatagtgttgccatcaagaaagcatgcaacatcattggtttctaatgattttatggcttgtgacaatattttatctggactgacatgcctctgctgcttttgctttgtacttcattgctggtaataaaatttcagatggaaaacttacaaaatatatacttaattagaagaaaaaaatagagaaagggctattagaattaaaaaaatttgaaagtaacttaatctaacatttatggcacagtttggacatatccataattttttttgggaacacacatttctgattttttttttcccccttaaagaagaaagtctcaattccattgattttcaattcttagccactggctcattgctttgagcaatgcttgattgattctatttatattatatgatattgggttgataaaataccagttcaatgatgagttttcttaacagaatttggtttgtacttgcagtggctgaacaaagagcatggcttgagaatcaaagggatctgcatttagcaatgtgatgtcagtaaatggacataacaggattgttgtaaaggttgggcatgatgtatgcaaagtactggccagggtagactaataactgatggcatttatatgctgtgctggaatattgttaccaagctgatgtgccgttctcaccctgcagaatactggttttgtcatttcataaatgatatttttataaat

SEQ ID NO: 45 - DNA, 4203 bp, Homo sapiens
  ref <308>: DATABASE ACCESSION NUMBER: D21851
  ref <309>: DATABASE ENTRY DATE: 2001-06-18
tgacaacatggcggcgcccatggtccgtggcccggcagtgctcgcctaaaggtggagaacgaggagtagaggaggccgcagccagagcctgtgagcagatccagacctacagataaaaaacattatttaatctatctgggatttactccggcttatgatttgagggccttctcaccttctgaagaatggcttctgtttggcagagattgggtttttatgcctctcttctgaaaagacagctaaatggtgggccagatgtcatcaagtgggaaaggagagtaattcccggatgtaccagaagcatctacagtgccacgggaaagtggacaaaagagtatacattgcagacaagaaaggatgttgagaaatggtggcatcaacgaataaaagaacaggcctccaaaatttcagaagctgataaatcgaagccaaaattttacgtgctttccatgttcccttatccttctggtaagctgcacatgggccatgtgcgtgtctacaccatcagcgacaccatagcacggttccagaagatgagagggatgcaggtcatcaaccccatgggatgggatgcttttggattgcctgctgaaaatgccgcagtcgagaggaatctacatccacaaagttggacacaaagtaatattaaacacatgaggaaacagcttgatcgtctgggcctgtgtttcagctgggatagggaaataactacgtgtttgccagattactacaagtggactcagtatctctttattaaactgtatgaggctgggctggcctatcaaaaggaggccctggttaactgggacccagtggatcaaacagtgcttgccaatgagcaggtggatgaacatggctgttcatggcgttctggagcaaaggtggaacagaagtacctcagacaatggtttattaagacaaccgcttatgcaaaggccatgcaggacgcgttggcagaccttccagaatggtatggaataaaaggcatgcaagcccactggattggggactgtgtgggctgccacctggacttcacattaaaggttcatgggcaagccacgggcgaaaagctgactgcctatacggccacccctgaagccatttatggcacctcccacgtggccatctcgcccagccacagactcctacatgggcacagctctctgaaggaagccttgaggatggcccttgtccctggcaaagattgcctcacgcctgtaatggctgtgaacatgcttacccagcaggaggtccctgtcgttattttggccaaagctgacttggaaggctctctggattcaaaaataggaattcccagtactagctcagaggacaccatcttagcccaaaccctgggcctggcctactctgaagtcattgaaactttgccagatggcacagagagactgagcagctctgctgagttcacaggtatgacccggcaggatgcttttctagccctgactcagaaagcccgggggaagagagtgggtggagacgtgacaagtgataaactgaaagactggctgatttcacggcagcggtactggggcacaccaatccccattgtccactgcccagtctgtggccccacacctgtgcccctggaggacttgcctgtgaccctgcccaacatcgcgtctttcactggcaagggaggccccccactggccatggcttcagagtgggtgaactgctcctgcccaaggtgcaagggagcagccaagagagagacagacacgatggatacctttgttgattctgcttggtactacttcagatacactgaccctcataatccacacagcccttttaacacagcagtggccgattactggatgcctgtggatttgtacattggagggaaagaacatgccgtcatgcacttgttctatgcaagattctttagtcatttttgccatgatcaaaaaatggttaaacatagggagccttttcataagctgctggcccaaggccttatcaaggggcagacattccgcctaccatctggacagtatctacagagagaggaagtggatctcacaggttccgttcctgttcatgcaaaaacgaaagagaagttagaggtgacgtgggagaagatgagtaagtccaaacacaacggggtggacccagaggaagttgtggagcagtatgggatcgacacgattcggctctacatcctttttgctgcccctcctgagaaggatatcttgtgggatgtgaaaactgatgctctccctggggtgctgagatggcaacaacgactgtggaccttgacaactcggtttattgaggccagggcttctgggaagtctccccagcctcagctgctgagtaacaaggagaaagctgaggccaggaagctctgggagtacaagaactccgtcatctctcaggtgaccacccatttcacagaggacttctcactgaattctgcaatttctcagctgatgggactcagcaatgccctctcgcaagcctctcagagcgtcattctccacagccccgagtttgaggatgctttgtgtgccctgatggtaatggctgctccactggcccctcatgtaacctcagagatctgggcaggcctggcgctggtgccgaggaagctctgtgcccactacacttgggatgccagtgtgctgctccaggcatggcctgctgtggacccggagttcctgcagcagcctgaggttgtccagatggcagttctgatcaacaataaagcttgtggcaaaattcctgtgccccaacaagttgcccgggaccaggacaaagtccacgaatttgttcttcaaagcgagctgggtgtcaggcttttgcaaggacgaagcatcaagaagtccttcctttccccgagaactgccctcatcaacttcctggtgcaagattgacagccaggaggctgcagctaccacgagggcctctgaggaacctccttccaggcctgggatgagggggcgatgtctgctggcccaggggaagggaaaagacaaatgtcttgactgttgacctcggtcctgtggcagactgcagtcaacagtgtgcctctgtagtgtggcctggtgctggggtgaaggtgagctgggcaaaggagaaatatgagctactgaggagggggttggacatcctgcccctcaccccccacccacactgcaggtagaggaggccatctgatcccatgggaagccatcagagacactgctggtgggagcaggaaggagcagtgcccctcgagcagccaggaagcctgcggatctgggaaatggctctgccttaggcacttctcgggaatttgaggccagcctgaggaactgcaggactcaggtgcaatgtgccagccacttggaactgctaactgagcctccagatggtagtgaatggtctctttgccttcaggctggatgaggaagtcatttaggaaatgttcaaataaccaatatgtggaaatggacacagggatcttctgaagttgctttgaatcaaaaggcaggcagtgctggttcctctgcctgtgtccccaccactccccagctctgtcatgcaggcctgtcctccccaaccccagctggatgtgcctcccaggcctgctgtggttctgacacacaggatcccaggcaaggcaccacttcctcacatgaatgaggagcagcaagtcataaccactcccttgggtatacaatttgctgtgtagtgaagtggaaccaggctcaggctgctggtcccaacctcagagccccaccgcagcccagtagggatgcagcacgccccagagggctcatgtgggccccagatggcaatgccaccattgttgatgtgactccagagccagttattaggaagagcaagctcaccacagaggagtggaactgaggccccccagatgttgcctccggtgtccaagccacagcggtctggctgttgggaagatggccaggaatggactcataccattggcacattaggctaatcctggttttatgtgaagtcagcaattaagtgttcccactagaactgacctaagccactgattaatatttaatgagggaaggtaggggagaatctagccattttataatgccagaaatctatatatgttatctgatgccatttttctgaagtagcctcacatgtggtccccctgcagttcagcagttaacagatgacttttttagtgtaataaaatgtttatcatctatg

SEQ ID NO: 46 - DNA, 4396 bp, Homo sapiens
  ref <308>: DATABASE ACCESSION NUMBER: M31523
  ref <309>: DATABASE ENTRY DATE: 2001-06-18
gcctgaggtgcccgccctggccccaggagaatgaaccagccgcagaggatggcgcctgtgggcacagacaaggagctcagtgacctcctggacttcagcatgatgttcccgctgcctgtcaccaacgggaagggccggcccgcctccctggccggggcgcagttcggaggttcaggtcttgaggaccggcccagctcaggctcctggggcagcggcgaccagagcagctcctcctttgaccccagccggaccttcagcgagggcacccacttcactgagtcgcacagcagcctctcttcatccacattcctgggaccgggactcggaggcaagagcggtgagcggggcgcctatgcctccttcgggagagacgcaggcgtgggcggcctgactcaggctggcttcctgtcaggcgagctggccctcaacagccccgggcccctgtccccttcgggcatgaaggggacctcccagtactacccctcctactccggcagctcccggcggagagcggcagacggcagcctagacacgcagcccaagaaggtccggaaggtcccgccgggtcttccatcctcggtgtacccacccagctcaggtgaggactacggcagggatgccaccgcctacccgtccgccaagacccccagcagcacctatcccgcccccttctacgtggcagatggcagcctgcacccctcagccgagctctggagtcccccgggccaggcgggcttcgggcccatgctgggtgggggctcatccccgctgcccctcccgcccggtagcggcccggtgggcagcagtggaagcagcagcacgtttggtggcctgcaccagcacgagcgtatgggctaccagctgcatggagcagaggtgaacggtgggctcccatctgcatcctccttctcctcagcccccggagccacgtacggcggcgtctccagccacacgccgcctgtcagcggggccgacagcctcctgggctcccgagggaccacagctggcagctccggggatgccctcggcaaagcactggcctcgatctactccccggatcactcaagcaataacttctcgtccagcccttctacccccgtgggctccccccagggcctggcaggaacgtcacagtggcctcgagcaggagcccccggtgccttatcgcccagctacgacgggggtctccacggcctgcagagtaagatagaagaccacctggacgaggccatccacgtgctccgcagccacgccgtgggcacagccggcgacatgcacacgctgctgcctggccacggggcgctggcctcaggtttcaccggccccatgtcgctgggtgggcggcacgcaggcctggttggaggcagccaccccgaggacggcctcgcaggcagcaccagcctcatgcacaaccacgcggccctccccagccagccaggcaccctccctgacctgtctcggcctcccgactcctacagtgggctagggcgagcaggtgccacggcggccgccagcgagatcaagcgggaggagaaggaggacgaggagaacacgtcagcggctgaccactcggaggaggagaagaaggagctgaaggccccccgggcccggaccagcccagacgaggacgaggacgaccttctccccccagagcagaaggccgagcgggagaaggagcgccgggtggccaataacgcccgggagcggctgcgggtccgtgacatcaacgaggcctttaaggagctggggcgcatgtgccaactgcacctcaacagcgagaagccccagaccaaactgctcatcctgcaccaggctgtctcggtcatcctgaacttggagcagcaagtgcgagagcggaacctgaatcccaaagcagcctgtttgaaacggcgagaagaggaaaaggtgtcaggtgtggttggagacccccagatggtgctttcagctccccacccaggcctgagcgaagcccacaaccccgccgggcacatgtgaaaggtatgcctccgtgggacgagccacccgctttcagccctgtgctctggccccagaagccggactcgagaccccgggcttcatccacatccacacctcacacacctgttgtcagcatcgagccaacaccaacctgacaaggttcggagtgatgggggcggccaaggtgacactgggtccaggagctccctggggccctggcctaccactcactggcctcgctccccctgtccccgaatctcagccaccgtgtcactctgtgacctgtcccatggatcctgaaactgcatcttggccctgttgcctgggctgacaggagcattttttttttttccagtaaacaaaacctgaaagcaagcaacaaaacatacactttgtcagagaagaaaaaaatgccttaactataaaaagcggagaaatggaaacatatcactcaagggggatgctgtggaaacctggcttattcttctaaagccaccagcaaattgtgcctaagcgaaatattttttttaaggaaaataaaaacattagttacaagattttttttttcttaaggtagatgaaaattagcaaggatgctgcctttggtctctggtttttttaagctttttttgcatatgttttgtaagcaacaaatttttttgtataaaagtcccgtgtctctcgctatttctgctgctgttcctagactgagcattgcatttcttgatcaaccagatgattaaacgttgtattaaaaagaccccgtgtaaacctgagccccccccgtccccccccccggaagccactgcacacagacagacggggacaggcggcgggtcttttgtttttttgatgttgggggttctcttggttttgtcatgtggaaagtgatgcgtgggcgttccctgatgaaggcaccttggggcttccctgccgcatcctctcccctcaggaaggggactgacctgggcttgggggaagggacgtcagcaaggtggctctgaccctcccaggtgactctgccaagcagctgtggccccagcggtaccctacacaacgccctccccaggcccccctaagctgctctcccttggaacctgcacagctctctgaaatggggcattttgttgggaccagtgacccctggcatggggaccacaccctggagcccggtgctggggacctcctggacaccctgtccttcactccttgccccagggacccaggctcatgctctgaactctggctgagaggagtctgctcaggagccagcacaggacaccccccaccccaccccaccatgtccccattacaccagagggccatcgtgacgtagacaggatgccaggggcctgaccagcctccccaatgctggggagcatccctggcctggggccacacctgctgccctccctctgtgtggtccaagggcaagagtggctggagccgggggactgtgctggtctgagccccacgaaggccttgggctgtggctccgaccctgctgcagaaccagcagggtgtcccctcgggcccatctgtgtcccatgtcccagcacccaggcctctctccaggtctccttttctggtcttttgccatgagggtaaccagctcttcccagctggctgggactgtcttgggtttaaaactgcaagtctcctaccctgggatcccatccagttccacacgaactagggcagtggtcactgtggcacccaggtgtgggcctggctagctgggggccttcatgtgcccttcatgcccctccctgcattgaggccttgtggacccctgggctggctgtgttcatccccgctgcaggtcgggcgtctccccccgtgccactcctgagactccaccgttacccccaggagatcctggactgcctgactcccctccccagactggcttgggagcctgggccccatggtagatgcaagggaaacctcaaggccagctcaatgcctggtatctgcccccagtccaggccaggcggaggggaggggctgtccggctgcctctcccttctcggtggcttcccctgcgccctgggagtttgatctcttaagggaacttgcctctccctcttgttttgctcctgccctgcccctaggtctgggtggcagtggccccatagcctctggaactgtgcgttctgcatagaattcaaacgagattcacccagcgcgaggaggaagaaacagcagttcctgggaaccacaattatggggggtggggggtgtgatctgagtgcctcaagatggttttcaaaaaattttttttaaagaaaataattgtatacgtgtcaacacagctggctggatgattgggactttaaaacgaccctctttcaggtggattcagagacctgtcctgtatataacagcactgtagcaataaacgtgacattttataaag

SEQ ID NO: 47 - DNA, 1498 bp, Homo sapiens
  ref <308>: DATABASE ACCESSION NUMBER: X02994
  ref <309>: DATABASE ENTRY DATE: 2001-06-18
accgctggccccagggaaagccgagcggccaccgagccggcagagacccaccgagcggcggcggagggagcagcgccggggcgcacgagggcaccatggcccagacgcccgccttcgacaagcccaaagtagaactgcatgtccacctagacggatccatcaagcctgaaaccatcttatactatggcaggaggagagggatcgccctcccagctaacacagcagaggggctgctgaacgtcattggcatggacaagccgctcacccttccagacttcctggccaagtttgactactacatgcctgctatcgcgggctgccgggaggctatcaaaaggatcgcctatgagtttgtagagatgaaggccaaagagggcgtggtgtatgtggaggtgcggtacagtccgcacctgctggccaactccaaagtggagccaatcccctggaaccaggctgaaggggacctcaccccagacgaggtggtggccctagtgggccagggcctgcaggagggggagcgagacttcggggtcaaggcccggtccatcctgtgctgcatgcgccaccagcccaactggtcccccaaggtggtggagctgtgtaagaagtaccagcagcagaccgtggtggccattgacctggctggagatgagaccatcccaggaagcagcctcttgcctggacatgtccaggcctaccaggaggctgtgaagagcggcattcaccgtactgtccacgccggggaggtgggctcggccgaagtagtaaaagaggctgtggacatactcaagacagagcggctgggacacggctaccacaccctggaagaccaggccctttataacaggctgcggcaggaaaacatgcacttcgagatctgcccctggtccagctacctcactggtgcctggaagccggacacggagcatgcagtcattcggctcaaaaatgaccaggctaactactcgctcaacacagatgacccgctcatcttcaagtccaccctggacactgattaccagatgaccaaacgggacatgggctttactgaagaggagtttaaaaggctgaacatcaatgcggccaaatctagtttcctcccagaagatgaaaagagggagcttctcgacctgctctataaagcctatgggatgccaccttcagcctctgcagggcagaacctctgaagacgccactcctccaagccttcaccctgtggagtcaccccaactctgtggggctgagcaacatttttacatttattccttccaagaagaccatgatctcaatagtcagttactgatgctcctgaaccctatgtgtccatttctgcacacacgtatacctcggcatggccgcgtcacttctctgattatgtgccctggccagggaccagcgcccttgcacatgggcatggttgaatctgaaaccctccttctgtggcaacttgtactgaaaatctggtgctcaataaagaagcccatggctggtggcatgc

SEQ ID NO: 48 - DNA, 1116 bp, Homo sapiens
  ref <308>: DATABASE ACCESSION NUMBER: J03592
  ref <309>: DATABASE ENTRY DATE: 2001-06-18
ctgcaggtccagcacgccagcaagcagatcgccgccgacaagcagtacaagggcatcgtggactgcattgtccgcatccccaaggagcagggcgtgctgtccttctggaggggcaaccttgccaacgtcattcgctacttccccactcaagccctcaacttcgccttcaaggataagtacaagcagatcttcctggggggcgtggacagacacgcgttctggaggtactttgcgggcaacctggcctccggcggtgcggccggcgcgacctccctctgcttcgtgtacccgctggattttgccagaacccgcctggcagcggacgtgggaaagtcaggcacagagcgcgagttccgaggcctgggagactgcctggtgaagatcaccaagtccgacggcatccggggcctgtaccagggcttcagtgtctccgtgcagggcatcatcatctaccgggcggcctacttcggcgtgtacgatacggccaagggcatgctccccgaccccaagaacacgcacatcgtggtgagctggatgatcgcgcagaccgtgacggccgtggccggcgtggtgtcctaccccttcgacacggtgcggcggcgcatgatgatgcagtccgggcgcaaaggagctgacatcatgtacacgggcaccgtcgactgttggaggaagatcttcagagatgaggggggcaaggccttcttcaagggtgcgtggtccaacgtcctgcggggcatggggggcgccttcgtgctggtcctgtacgacgagctcaagaaggtgatctaagggccgcggcctcctccacacacacacacacaccaggggaaccaagagaaccacgtagaatcctcaaccgtgcggaccatcaaccttcgagaaattccagttgtctttttcccagccgcatcctgcctgtagatggccggggaaggctctagaaaaggggcgcattgcgatccaaccatcggcagccgattccgtgtcttgatcacggggtgggagggaaccgtggcgtccctgcgtggggcccatgggtgagacactccagtactgagacctagagtccagatgcttgtaggagccaagtcgtgttctaagtatttatttaaaaca

SEQ ID NO: 49 - DNA, 3727 bp, Homo sapiens
  ref <308>: DATABASE ACCESSION NUMBER: D21262
  ref <309>: DATABASE ENTRY DATE: 2001-06-18
cggccgccggcattcgccgcgtggttcccagcgacctgtatcccctcgtgctcggcttcctgcgcgataaccaactctcagaggtggccaataagttcgccaaagcgacaggagctacacagcaggatgccaatgcctcttccctcttagacatctatagcttctggctcaagtctgccaaggtcccagagcgaaagttacaggcaaatggaccagtggctaagaaagctaagaagaaggcctcatccagtgacagtgaggacagcagcgaggaggaggaggaagttcaagggcctccagcaaagaaggctgctgtacctgccaagcgagtcggtctgcctcctgggaaggctgcagccaaagcatcagagagtagcagcagtgaagagtccagtgatgatgatgatgaggaggaccaaaagaaacagcctgtccagaagggagttaagccccaagccaaggcagccaaagctcctcctaagaaggccaagagctctgattctgattctgactcaagctccgaggatgagccaccaaagaaccagaagccaaagataacacctgtgacagttaaagctcagactaaagcccctcccaaaccagctcgagcagcacctaaaatagccaatggtaaagcagccagtagcagcagtagcagcagcagcagcagtagcagtgatgactcagaggaggagaaggcagcagccacccccaagaaggtctggaccataacttctgtcagggcagagactgtacctaaaaagcaagttgtggccaaggccccagtgaaagcagctaccacccctacccggaagagttctagcagtgaggattcctccagtgacgaggaagaggagcaaaaaaaacccatgaaaaataaaccaggtccctacagttcagtccccccgccttctgctcccccaccaaagaagtctctgggaacccagcctcccaagaaggctgtggagaagcagcagcctgtggaaagcagtgaagacagcagtgatgagtctgattcaagttctgaagaagagaagaaacccccaactaaggcagtagtctctaaagcaaccactaaaccacctccagcaaagaaagcagcagagagctcttcagacagctcagactctgacagctctgaggatgatgaagctccttctaagccagctggtaccaccaagaattcttcaaataagccagctgtcaccaccaagtcacctgcagtgaagccagctgcagcccccaagcaacctgtgggcggtggccagaagcttctgacgagaaaggctgacagcagctccagtgaggaagagagcagctccagtgaggaggagaagacaaagaagatggtggccaccactaagcccaaggcgactgccaaagcagctctacctctgcctgccaagcaggctcctcagggtagtagggacagcagctctgattcagacagctccagcagtgaggaggaggaagagaagacatctaagtctgcagttaagaagaagccacagaaggtagcaggaggtgcagccccttccaagccagcctctgcaaagaaaggaaaggctgagagcagcaacagttcttcttctgatgactccagtgaggaagaggaagagaagctcaagggcaagggctctccaagaccacaagcccccaaggccaatggcacctctgcactgactgcccagaatggaaaagcagctaagaacagtgaggaggaggaagaagaaaagaaaaaggcggcagtggtagtttccaaatcaggttcattaaagaagcggaagcagaatgaggctgccaaggaggcagagactcctcaggccaagaagataaagcttcagacccctaacacatttccaaaaaggaagaaaggagaaaaaagggcatcatccccattccgaagggtcagggaggaggaaattgaggtggattcacgagttgcggacaactcctttgatgccaagcgaggtgcagccggagactggggagagcgagccaatcaggttttgaagttcaccaaaggcaagtcctttcggcatgagaaaaccaagaagaagcggggcagctaccggggaggctcaatctctgtccaggtcaattctattaagtttgacagcgagtgacctgaggccatcttcggtgaagcaagggtgatgatcggagactacttactttctccagtggacctgggaaccctcaggtctctaggtgagggtcttgatgaggacagaagtttagagtaggtcctaagactttacagtgtaacatcctctctggtccttttctgtgttcctagttttgtacagacttgtttttgagtgttgagtagcagggacaaaataagggaatgttattttttaagaaaattcattttcattgttgtctccttccttttctgtgaaagtcctcatactgagaaatttgtatattttatattaaatcacttactattgatttttgttgtgattttcaaaggtggattcccacagataaaatcttggctattgcccaaaacatagtaaagggtcacgtgtgactttttataataggaagaaaattctgcctttgtgagtgcacatgtccacatttcatccctccttccctcaaaaccctagagaggggcattaaagaattgttgatgtatatgcaatgtctgttaagcatgcactatgtatttcatcctcatttattgggtctgggactgaagtttttagccagcatggacctaacctactttttgggataaaattctctgttttgttacaggcaaaattctggtatggcgtgaatgccatgggtcattctgaatatatttttttctgtaattttatcattacacgatgtttgcaatacgtgctttgttttttaatttgaaagcaaacttttctactgttgaaagacattttttgacaacttgacccttcctagtattgagttctaagttgaggactgcatcttctcgttttttacagtatagagaacaaaatgacattagtttgaaaaatacatatcacttggtattgctgtcttggttgcagtggtgatacagaattggtttcattaattcctacatggttgagaatcactgatcaagaaagtggggggaaaaaaaacaaacgttaaaacctcaatcctcagtaggaaggtagattacattaggtgaaattataggtaatctatgtatgtgctaatggggttggaaagaaccttacagagcatattacctgataaactggagtgggtttgggagaacaaactaataggattattgtgtctcctagttggtacctgggagcaattgacatgcccccttcagaaccttaactgttagtagcagtggctgtaacaacacaaaccagtgaccagagataacagcttttaggccaagctggcctgacggtatggctgcaggaagtgactgagcagtagcggtactcagccagaccaagacggagagggaagagtccacagctttctggaagctaaggcattctggtggtagaaaagtgtgccccaagccttcatggacgagttataggtcttaagattagtctcctcttgtttggattccatacttgctaaataacctgataataacctggttttccatgtaactgcctctaggaagaaaatgtactgttcatgctgacacagatatttcagtctgcatggtaaaagttctaaatcttactacaaaataataaactggctggtttataatgtg

SEQ ID NO: 50 - DNA, 1750 bp, Homo sapiens
  ref <308>: DATABASE ACCESSION NUMBER: AF070735
  ref <309>: DATABASE ENTRY DATE: 2001-06-18
tggtaactcaggcgccgggcgcactgtccgtagctgctggttttccacgctggttttagctcccggcgtctgcaaaatgaagattgaggaggtgaagagcactacgaagacgcagcgcatcgcctcccacagccacgtgaaagggctggggctggacgagagcggcttggccaagcaggcggcctcagggcttgtgggccaggagaacgcgcgagaggcatgtggcgtcatagtagaattaatcaaaagcaagaaaatggctggaagagctgtcttgttggcaggacctcctggaactggcaagacagctctggctctggctattgctcaggagctgggtagtaaggtccccttctgcccaatggtggggagtgaagtttactcaactgagatcaagaagacagaggtgctgatggagaacttccgcagggccattgggctgcgaataaaggagaccaaggaagtttatgaaggtgaagtcacagagctaactccgtgtgagacagagaatcccatgggaggatatggcaaaaccattagccatgtgatcataggactcaaaacagccaaaggaaccaaacagttgaaactggaccccagcatttttgaaagtttgcagaaagagcgagtagaagctggagatgtgatttacattgaagccaacagtggggccgtgaagaggcagggcaggtgtgatacctatgccacagaattcgaccttgaagctgaagagtatgtccccttgccaaaaggggatgtgcacaaaaagaaagaaatcatccaagatgtgaccttgcatgacttggatgtggctaatgcgcggccccaggggggacaagatatcctgtccatgatgggccagctaatgaagccaaagaagacagaaatcacagacaaacttcgaggggagattaataaggtggtgaacaagtacatcgaccagggcattgctgagctggtcccgggtgtgctgtttgttgatgaggtccacatgctggacattgagtgcttcacctacctgcaccgcgccctggagtcttctatcgctcccatcgtcatctttgcatccaaccgaggcaactgtgtcatcagaggcactgaggacatcacatcccctcacggcatccctcttgaccttctggaccgagtgatgataatccggaccatgctgtatactccacaggaaatgaaacagatcattaaaatccgtgcccagacggaaggaatcaacatcagtgaggaggcactgaaccacctgggggagattggcaccaagaccacactgaggtactcagtgcagctgctgaccccggccaacttgcttgctaaaatcaacgggaaggacagcattgagaaagagcatgtcgaagagatcagtgaacttttctatgatgccaagtcctccgccaaaatcctggctgaccagcaggataagtacatgaagtgagatggctgaggttttcagcagcaagagactccccaggtgtgcctggcctgggtccagcctgtgggcgcttgcccctgggcttggggctgccgtccccactcaggcgtgggctgcagcgctgtcagttcagtgtggaaagcatttctttttaagttatcgtaactgttcctgtggttgctttgaaagaacccttccttacctggtgtgttttctataaatcttcataggttattttgattcttctctctctctctctaagttttttaaaaataaacttttcagaacagttaaaaaaaaaaaaaa

SEQ ID NO: 51 - DNA, 1726 bp, Homo sapiens
  ref <308>: DATABASE ACCESSION NUMBER: U54778
  ref <309>: DATABASE ENTRY DATE: 2001-06-18
gagtcggagacactatccgcttccatccgtcgcgcagaccctgccggagccgctgccgctatggatgatcgagaggatctggtgtaccaggcgaagctggccgagcaggctgagcgatacgacgaaatggtggagtcaatgaagaaagtagcagggatggatgtggagctgacagttgaagaaagaaacctcctatctgttgcatataagaatgtgattggagctagaagagcctcctggagaataatcagcagcattgaacagaaagaagaaaacaagggaggagaagacaagctaaaaatgattcgggaatatcggcaaatggttgagactgagctaaagttaatctgttgtgacattctggatgtactggacaaacacctcattccagcagctaacactggcgagtccaaggttttctattataaaatgaaaggggactaccacaggtatctggcagaatttgccacaggaaacgacaggaaggaggctgcggagaacagcctagtggcttataaagctgctagtgatattgcaatgacagaacttccaccaacgcatcctattcgcttaggtcttgctctcaatttttccgtattctactacgaaattcttaattcccctgaccgtgcctgcaggttggcaaaagcagcttttgatgatgcaattgcagaactggatacgctgagtgaagaaagctataaggactctacacttatcatgcagttgttacgtgataatctgacactatggacttcagacatgcagggtgacggtgaagagcagaataaagaagcgctgcaggacgtggaagacgaaaatcagtgagacataagccaacaagagaaaccatctctgaccaccccctcctccccatcccaccctttggaaactccccattgtcactgagaaccaccaaatctgacttttacatttggtctcagaatttaggttcctgccctgttggttttttttttttttttttttaaacagttttcaaaagttcttaaaggcaagagtgaatttctgtggattttactggtcccagcttttaggttctttaagacactaacaggactacatagaggctttttcagcattactgtgtcgtctccgtgccagatgtggcaagatcaccattagcaaatggaaattacatttgaaagccattagacttataggtgatgcaagcatctaagagagaggttaatcacactatagaggcataagtggtatcagttttcatttttctaattgtttaaactgtgttttataccagtgtttgcaagtaattgggtgttagcttgagatggttaaaggtggtttggggagggacttcgttgtaatggttttgctgtaaaaaatgtttccaactccgctgaaatgttgctgaaaagcatggtgctggtaacagttcaacaatccgtggctgctcattcttgcctactttactctcccactgaagcaggttagcgttgaaggtggtatggaaaagcctgcatgcctgttcaattcttttgtttcttctccttccccctccccctacctccttcccctcactcctcccctccttcgctcgctcaacctcttttgttcagtatgtgtaacttgaagctaatttgtactactggatatctgactggagccacagatacagaatctgtattgttcttactgaaacacagcatggaattaacattaaacttaaataaaacaaacctaaatt

SEQ ID NO: 52 - DNA, 1568 bp, Homo sapiens
  ref <308>: DATABASE ACCESSION NUMBER: AF030424
  ref <309>: DATABASE ENTRY DATE: 2001-06-18
cgtccttcctcagccgcgggtgatcgtagctcggaaatggcgggatttggtgctatggagaaatttttggtagaatataagagtgcagtggagaagaaactggcagagtacaaatgtaacaccaacacagcaattgaactaaaattagttcgttttcctgaagatcttgaaaatgacattagaactttctttcctgagtatacccatcaactctttggggatgatgaaactgcttttggttacaagggtctaaagatcctgttatactatattgctggtagcctgtcaacaatgttccgtgttgaatatgcatctaaagttgatgagaactttgactgtgtagaggcagatgatgttgagggcaaaattagacaaatcattccacctggattttgcacaaacacgaatgatttcctttctttactggaaaaggaagttgatttcaagccattcggaaccttacttcatacctactcagttctcagtccaacaggaggagaaaactttacctttcagatatataaggctgacatgacatgtagaggctttcgagaatatcatgaaaggcttcagacctttttgatgtggtttattgaaactgctagctttattgacgtggatgatgaaagatggcactactttctagtatttgagaagtataataaggatggagctacgctctttgcgaccgtaggctacatgacagtctataattactatgtgtacccagacaaaacccggccacgtgtaagtcagatgctgattttgactccatttcaaggtcaaggccatggtgctcaacttcttgaaacagttcatagatactacactgaatttcctacagttcttgatattacagcggaagatccatccaaaagctatgtgaaattacgagactttgtgcttgtgaagctttgtcaagatttgccctgtttttcccgggaaaaattaatgcaaggattcaatgaagatatggcgatagaggcacaacagaagttcaaaataaataagcaacacgctagaagggtttatgaaattcttcgactactggtaactgacatgagtgatgccgaacaatacagaagctacagactggatattaaaagaagactaattagcccatataagaaaaagcagagagatcttgctaagatgagaaaatgtctcagaccagaagaactgacaaaccagatgaaccaaatagaaataagcatgcaacatgaacagctggaagagagttttcaggaactagtggaagattaccggcgtgttattgaacgacttgctcaagagtaaagattatactgctctgtacaggaagcttgcaaattttctgtacaatgtgctgtgaaaaatctgatgactttaattttaaaatcttgtgacattttgcttatactaaaagttatctatctttagttgaatattttcttttggagagattgtatattttaaaatactgtttagagtttatgagcatatattgcatttaaagaaagataaagcttctgaaatactactgcaattgcttcccttcttaaacagtataataaatgcttagttgtgat

SEQ ID NO: 53 - DNA, 1496 bp, Homo sapiens
  ref <308>: DATABASE ACCESSION NUMBER: M94065
  ref <309>: DATABASE ENTRY DATE: 2001-06-18
aaattaccgtggagacacctgcaaaagcgggcccaggatgctgtgatcatcctggggggaggaggacttctcttcgcctcctacctgatggccacgggagatgagcgtttctatgctgaacacctgatgccgactctgcaggggctgctggacccggagtcagcccacagactggctgttcgcttcacctccctggggctccttccacgggccagatttcaagactctgacatgctggaagtgagagttctgggccataaattccgaaatccagtaggaattgctgcaggatttgacaagcatggggaagccgtggacggactttataagatgggctttggttttgttgagataggaagtgtgactccaaaacctcaggaaggaaaccctagacccagagtcttccgcctccctgaggaccaagctgtcattaacaggtatggatttaacagtcacgggctttcagtggtggaacacaggttacgggccagacagcagaagcaggccaagctcacagaagatggactgcctctgggggtcaacttggggaagaacaagacctcagtggacgccgcggaggactacgcagaaggggtgcgcgtactgggccccctggccgactacctggtggtgaatgtgtccagccccaacactgccgggctgcggagccttcagggaaaggccgagctgcgccgcctgctgaccaaggtgctgcaggagagggatggcttgcggagagtgcacaggccggcagtcctggtgaagatcgctcctgacctcaccagccaggataaggaggacattgccagtgtggtcaaagagttgggcatcgatgggctgattgttacgaacaccaccgtgagtcgccctgcgggcctccagggtgccctgcgctctgaaacaggagggctgagtgggaagcccctccgggatttatcaactcaaaccattcgggagatgtatgcactcacccaaggccgagttcccataattggggttggtggtgtgagcagcgggcaggacgcgctggagaagatccgggcaggggcctccctggtgcagctgtacacggccctcaccttctgggggccacccgttgtgggcaaagtcaagcgggaactggaggcccttctgaaagagcagggctttggcggagtcacagatgccattggagcagatcatcggaggtgaggacagcgtctgacgggaagcctgatctggaaccttcccaaggactcaggcaagcctttgtggctggatcatgagaggagggactccatcttgagccatgtcccccagcctggcatgcgtgcactgtaaacgccaatcggggggtcaccaggatcaaccgcaggctttcttcagtcccttggtcagaccataaactgcatttttgattctttgtggattcaaaccctaggatccatcagtcttgcaaggacattgaatattaggaggaaaaagtcatggaaaaaataaagccatttagaacctgg

SEQ ID NO: 54 - DNA, 2758 bp, Homo sapiens
  ref <308>: DATABASE ACCESSION NUMBER: X52142
  ref <309>: DATABASE ENTRY DATE: 2001-06-18
ctatccgcgcgcgtcgccggcccagtcctgtcgctgacgggaggatctgaagccggccgcaggtcaaagagtaaaatgaagtacattctggttactggtggtgttatatcaggaattggaaaaggaatcattgccagcagtgtgggcacaatactcaagtcatgtggtttacatgtaacttcaatcaaaattgacccctacattaacattgatgcaggaacattctctccttatgagcatggtgaggtttttgtgctggatgatggtggggaagtagaccttgacctgggtaactatgagcggttccttgacatccgcctcaccaaggacaataatctgaccactggaaagatataccagtatgtcattaacaaggaacggaaaggagattacttggggaaaactgtccaagttgtccctcatatcacagatgcaatccaggagtgggtgatgagacaggcgttaatacctgtagatgaagatggcctggaacctcaagtgtgtgttattgagcttggtggaaccgtgggggacatagaaagcatgccctttattgaggccttccgtcagttccaattcaaggtcaaaagagagaacttttgtaacatccacgtcagtctagttccccagccaagttcaacaggggaacagaagactaaacctacccagaatagtgttcgggaacttagaggacttgggctttccccagatctggttgtatgcaggtgctcaaatccacttgacacatcagtgaaggagaaaatatcaatgttctgccatgttgagcctgaacaagtgatctgtgtccacgatgtctcatccatctaccgagtccccttgttgttagaggagcaaggggttgtagattattttcttcgaagacttgaccttcctattgagaggcagccaagaaaaatgctgatgaaatggaaagagatggctgacagatatgatcgcttgctggagacctgctctattgcccttgtggcgaaatacaccgagttctcagactcctatgcctctgtcattaaggctctggagcattctgcactggccatcaaccacaaattggaaatcaagtacatagattctgcggacttggagcccatcacctcgcaagaagagcccgtgcgctaccacgaagcttggcagaagctctgtagtgctcatggagtgctggttccaggaggatttggtgttcgaggaacagaaggaaaaatccaagcaattgcctgggctcggaatcagaaaaagccttttttgggcgtgtgcttagggatgcagttggcagtggttgaattctcaagaaacgtgctgggatggcaagatgccaattctacagagtttgaccctacgaccagtcatcccgtggtcgtagacatgccagaacacaacccagggcagatgggcggaaccatgaggctgggcaagaggagaaccctgttccagaccaagaactcagtcatgaggaaactctatggagacgcagactacttggaagagaggcaccgccaccgatttgaggtgaatccagtctggaaaaagtgtttggaagaacaaggcttgaagtttgttggccaagatgttgaaggagagagaatggaaattgtggagttagaagatcatcccttttttgttggggttcagtaccaccctgagttcctgtccaggcctatcaagccctccccaccatactttggcctcctcctggcctctgtggggcggctctcacattacctccagaaaggctgcaggctctcacccagggacacctatagtgacaggagtggaagcagctcccctgactctgaaatcaccgaactgaagtttccatcaataaatcatgactgatcttgtagcggatgattcttcaagagacccttcaaacttgggtagagtttacagctctgactttacactcggctttggagactttctttaaattatgtttttattaagattattttattatgcggaaaggtatttgggaaacttgtcacttgcatgtcccatcacgtgtactggctcctctgtggtgtctgcctgttgcgtgacactctccttgcagttcttgagttgcggcagaacatcgcgatgggaaccgatggtgggtggggctgcagatgtccccatcggtcaccttgtttctcaactacctcgcatcattgcagatcgtagcgcgttgcctgtcgctttcccttggatacctagaccgttataaagtgtgccacatggacttaccgagcatggagagaggattttagctaggatttgaacacttggtgctgggaacctcagggtattgcttgccactaagccatgaaaccagagacaaaatctctatactgccctgagttggggggaattctcagtgccaactgtggctggtcctcattcaaagggacggtcagtttggtgtcaacatgaaacaccaagatgtctgtctctgaagcgtgattttaaaatccccatgcctgtgcgtgcgcttcctatttctagggctgggaaacactccttgcatcaaggggtcacttacagaacaaagaatcttttgggggaaacttcctctaaaaccctctcatatatagacagctttgactggagggtccatttttcttccaggatggtgttactgcagttgaagggcaatatgaagttactttcttaatgtgacctagcaataggcatagctacgtggcactatattctggccagactcgatgtgtactctaacttaagaaataaatcagtaaggcag

SEQ ID NO: 55 - DNA, 1240 bp, Homo sapiens
  ref <308>: DATABASE ACCESSION NUMBER: M69039
  ref <309>: DATABASE ENTRY DATE: 2001-06-18
ctgcgctgcgtgccccgtgtgctgggctcctccgtcgccggcctccgcgctgccgcgcccgcctcgcctttccggcagctcctgcagccggcaccccggctgtgcacccggcccttcgggctgctcagcgtgcgcgcaggttccgagcggcggccgggcctcctgcggcctcgcggaccctgcgcctgtggctgtggctgcggctcgctgcacaccgacggagacaaagcttttgttgatttcctgagtgatgaaattaaggaggaaagaaaaattcagaagcataaaaccctccctaagatgtctggaggttgggagctggaactgaatgggacagaagcgaaattagtgcggaaagttgccggggaaaaaatcacggtcactttcaacattaacaacagcatcccaccaacatttgatggtgaggaggaaccctcgcaagggcagaaggttgaagaacaggagcctgaactgacatcaactcccaatttcgtggttgaagttataaagaatgatgatggcaagaaggcccttgtgttggactgtcattatccagaggatgaggttggacaagaagacgaggctgagagtgacatcttctctatcagggaagttagctttcagtccactggcgagtctgaatggaaggatactaattatacactcaacacagattccttggactgggccttatatgaccacctaatggatttccttgccgaccgaggggtggacaacacttttgcagatgagctggtggagctcagcacagccctggagcaccaggagtacattacttttcttgaagacctcaagagttttgtcaagagccagtagagcagacagatgctgaaagccatagtttcatggcaggctttggccagtgaacaaatcctactctgaagctagacatgtgctttgaaatgattatcatcctaatatcatgggggaaaaaataccaaatttaaattatatgttttgtgttctcatttattatcatttttttctgtacaaatctattatttctagatttttgtataacatgatagacataaaattggtttatctcctgctgagtcttcctagaagtacctgctgggttctcagttccagttcccatcctttgattgatcactctccctgacatccacctgtatgactttgtcaccaaatgctgtcttctctttctccaatcaagaaataataatccctcgagtttacaaaacaaaaaaaaaaaaaa

SEQ ID NO: 56 - DNA, 1901 bp, Homo sapiens
  ref <308>: DATABASE ACCESSION NUMBER: X74801
  ref <309>: DATABASE ENTRY DATE: 2001-06-18
atggggcatcggccggtgctcgtgctcagccagaacacaaagcgtgaatccggaagaaaagttcaatctggaaacatcaatgctgccaagactattgcagatatcatccgaacatgtttgggacccaagtccatgatgaagatgcttttggacccaatgggaggcattgtgatgaccaatgatggcaatgccattcttcgagagattcaagtccagcatccagcggccaagtccatgatcgaaattagccggacccaggatgaagaagttggagatgggaccacatcagtaattattcttgcaggggaaatgctgtctgtagctgagcacttcctggagcagcagatgcacccaacagtggtgatcagtgcttaccgcaaggcattggatgatatgatcagcaccctaaagaaaataagtatcccagtcgacatcagtgacagtgatatgatgctgaacatcatcaacagctctattactaccaaagccatcagccggtggtcatctttggcttgcaacattgccctggatgctgtcaagatggtacagtttgaggagaatggtcggaaagagattgacataaaaaaatatgcaagagtggaaaagatacctggaggcatcattgaagactcctgtgtcttgcgtggagtcatgattaacaaggatgtgacccatccacgtatgcggcgctatatcaagaaccctcgcattgtgctgctggattcttctctggaatacaagaaaggaggaagccagactgacattgagattacacgagaggaggacttcacccgaattctccagatggaggaagagtacatccagcagctctgtgaggacattatccaactgaagcccgatgtggtcatcactgaaaagggcatctcagatttagctcagcactaccttatgcgggccaatatcacagccatccgcagagtccggaagacagacaataatcgcattgctagagcctgtggggcccggatagtcagccgaccagaggaactgagagaagatgatgttggaacaggagcaggcctgttggaaatcaagaaaattggagatgaatactttactttcatcactgactgcaaagaccccaaggcctgcaccattctcctccggggggctagcaaagagattctctcggaagtagaacgcaacctccaggatgccatgcaagtgtgtcgcaatgttctcctggaccctcagctggtgccagggggtggggcctccgagatggctgtcgcccatgccttgacagaaaaatccaaggccatgactggtgtggaacaatggccatacagggctgttgcccaggccctagaggtcattcctcgtaccctgatccagaactgtggggccagcaccatccgtctacttacctcccttcgggccaagcacacccaggagaactgtgagacctggggtgtaaatggtgagacgggtactttggtggacatgaaggaactgggcatatgggagccattggctgtgaagctgcagacttataagacagcagtggagacggcagttctgctactgcgaattgatgacatcgtttcaggccacaaaaagaaaggcgatgaccagagccggcaaggcggggctcctgatgctggccaggagtgagtgctaggcaaggctacttcaatgcacagaaccagcagagtctccccttttcctgagccagagtgccaggaacactgtggacgtctttgttcagaagggatcaggttggggggcagcccccagtccctttctgtcccagctcagttttccaaaagacactgacatgtaattcttctctattgtaaggtttccatttagtttgcttccgatgattaaatctaagtcatttgaaaaaaaaaaaaaaaaaaaaaaaaaaaaaaaaaaaa

SEQ ID NO: 57 - DNA, 6628 bp, Homo sapiens
  ref <308>: DATABASE ACCESSION NUMBER: D43948
  ref <309>: DATABASE ENTRY DATE: 2001-06-18
cccagctgaggaaatactcttaattctaaggaaaacctggaagcacaatgggagatgacagtgagtggttgaaactgccagttgatcagaaatgtgaacacaagctgtggaaagcaaggttaagtgggtatgaagaggccctgaagatcttccagaaaataaaggatgaaaagagcccagagtggtccaaatttttaggattgatcaaaaaatttgtcactgattccaatgcagtggttcaattgaaaggattagaagctgcacttgtttatgttgaaaatgcccatgtagcaggaaaaaccacaggagaagttgtgtcaggtgttgtaagtaaggtgttcaatcaacctaaagctaaagccaaggagctgggcatagagatctgtcttatgtacatagagattgagaaaggagaggctgttcaagaagagctcctgaaaggcttggacaataagaatcccaagatcatagtggcctgtatagagacactgaggaaagccttaagtgaatttggttccaaaatcatcttgcttaagccaattatcaaagtgttgccaaaactctttgagtctcgagagaaggctgttcgagatgaagccaaactaattgctgtggagatttacagatggattcgggatgctctgagacccccattacaaaatataaactctgttcagttgaaagaactagaagaagaatgggtcaaactgccaacaagtgctcctagacctactcgatttcttcgttcccaacaagaactagaagctaaattggaacaacaacagtctgctggtggagatgctgaaggaggtggtgatgatggtgatgaggtgccacaaatagatgcttatgagcttttagaagctgtagaaatcctttccaaacttcccaaagacttttatgacaaaattgaggcaaaaaaatggcaagagagaaaagaggccctggagtctgtagaagtactaataaaaaaccccaaactggaagctggcgattatgcagatttagtaaaagcattaaagaaggttgttggaaaggacaccaatgtcatgttggtggctttggcagcaaaatgtcttactggcctggctgttgggctaaggaagaaatttggacaatatgcaggacatgttgtgccaaccatcttggagaaattcaaagagaagaaacctcaagtggtacaagccctgcaggaggcaattgatgcaatcttccttactaccacactacagaacatcagtgaggatgttttagcagtaatggataataaaaatccaaccatcaagcagcagacatctctttttattgcaagaagtttccgccactgcactgcttctaccctgccaaagagcttgctaaagcccttttgtgctgcactacttaagcacatcaatgattctgctcctgaagtcagagatgccgcatttgaagcattgggtactgctttgaaggtggttggcgagaaagcagtaaaaccattcctagctgatgtggacaaactcaagcttgataagatcaaagaatgttcagaaaaggtagaactgatacatggtaagaaagctggactagctgctgataagaaggaattcaaacctctgcctggaaggactgctgcttcaggggctgcaggagataaggacacaaaggacatttctgcacccaaaccaggacctctaaaaaaggcacctgctgctaaggctggtgggccaccaaaaaaggggaaaccagctgcaccaggaggcgcagggaatactggaaccaagaacaagaaaggactggagactaaagaaatagtggagcctgagctctcgatagaagtatgtgaagaaaaagcttcagctgttcttccccctacctgtatacagcttcttgacagcagtaactggaaagaaaggctggcttgtatggaagagttccagaaggctgttgagctaatggaccgaactgaaatgccatgccaggcattagtgaggatgctagccaagaaacctggatggaaagaaactaattttcaggtgatgcaaatgaagcttcatatagttgctttgattgcccagaagggaaatttttccaaaacgtcagctcaggttgtattagatggccttgtggacaagattggagatgtgaaatgtgggaacaatgcaaaagaagctatgacagcaatagccgaagcctgtatgttaccatggactgctgaacaggttgtgtcaatggctttctcacaaaagaatcccaaaaatcagtcagaaactctgaattggctatcaaatgccataaaagaatttggtttttctgggttgaatgtcaaagctttcattagcaatgtgaagacagctcttgctgcaacaaacccagctgtgaggactgctgccataaccctgcttggcgtgatgtatctgtatgttggtccctctttgcgaatgttctttgaggatgagaagcctgccctcctatcccagatagatgcagaatttgagaagatgcagggacaaagtccacctgctccaaccagaggaatttccaagcatagcacaagtggtacagatgaaggagaagatggagatgaaccagatgacgggagcaatgatgtcgttgatcttttgccgaggacggagatcagtgataaaatcacttcagagttggtatctaagattggtgataagaattggaagattaggaaagaaggcctagatgaagtggcaggtattattaatgacgcaaaatttatccaaccgaatataggtgaacttccaactgccttgaagggtcgactcaatgattcaaataaaatcttggtacagcaaacgctgaatatcctgcaacaactggcagtagccatgggcccaaatattaagcaacatgtaaaaaatttaggcatccctatcatcacagtccttggagacagcaagaacaatgttcgagctgctgccctagcgactgtgaatgcttgggcagaacagactggcatgaaggaatggctggaaggagaagatctttctgaagagctcaaaaaggaaaatcctttcttgaggcaagagcttctgggctggctggctgagaaactacctactcttcgttccacccctacagaccttatcctttgtgttcctcatctctactcctgcctagaagatcgaaatggagatgtgcgaaagaaggcccaagatgccttgccattcttcatgatgcatttaggatatgaaaaaatggccaaggctactgggaaactaaagccaacttctaaagatcaggtattggccatgctagagaaagccaaagttaacatgccagccaagcctgctccacccactaaagcaacttctaaaccaatgggagggtccgctccagccaaattccagcctgcatcagcacctgctgaagattgtatttccagcagtacagaacccaaacctgatccaaaaaaggccaaagctccaggattatcctctaaagcaaagagtgcacaagggaagaagatgccaagcaaaaccagcttaaaggaggatgaagacaaatccgggcctatttttattgttgttccaaatggaaaagagcaaaggatgaaagatgaaaaaggattgaaggtgctaaagtggaattttactaccccacgggatgaatacattgagcaactaaagactcaaatgtctagctgtgtggctaaatggttacaagatgagatgtttcactcagactttcagcatcataacaaagcccttgctgttatggttgatcacttggagagtgaaaaagaaggagttattggttgcctggatcttatcttaaagtggcttaccctgaggttttttgacaccaatacaagcgtcctgatgaaagcactagaatatttaaaattgctcttcaccttgctaagtgaagaagaatatcatcttactgagaatgaagcatcttccttcatcccctatcttgtcgtcaaggttggagaaccaaaggatgtcattcgtaaagatgttcgtgccatcctgaaccggatgtgccttgtctacccagctagcaagatgtttccctttatcatggaaggaaccaaatccaaaaactctaagcagagagcagagtgcctggaagagctgggatgtctggttgagtcctatggcatgaatgtttgccaaccaaccccaggaaaagccttaaaggaaatagctgttcacataggagaccgtgacaatgctgtacgcaatgctgcactcaacaccattgtaacggtgtacaatgtacatggggatcaggtgttcaaactgattggaaatctttctgaaaaggatatgagcatgctcgaggagaggattaagcggtcagcaaagagaccctctgctgcaccaataaaacaggtggaagagaaacctcagcgtgcacagaacataagctccaatgccaacatgttacgcaagggaccagctgaggacatgtcttccaaactcaaccaagcccgaagcatgagtgggcatcctgaggcagcccagatggtccgccgagaattccagctggatctagatgagattgagaatgacaatggtacagtccgatgtgaaatgccagaacttgttcagcacaaactggatgacatttttgagccagtccttattcctgaacccaagatccgggctgtttctccacacttcgatgacatgcacagtaatacagcatccacaatcaatttcattatctcccaagtagccagtggtgacatcaacacaagtatccaagctctgacacagatcgatgaggtcctgagacaggaagacaaagctgaagccatgtccggccatattgatcagtttctgatagccacttttatgcagctaagactcatctacaacacacacatggcagatgagaaattggagaaggacgagatcatcaagttgtatagctgtatcattggcaacatgatttcgctgtttcagatagagagccttgcccgggaggcctccactggagtactaaaagacctaatgcatggcctcatcaccttaatgctggattctcggattgaagatcttgaggaaggacaacaggtcatccgctctgtgaacctcttggtggtgaaggttctggagaagtcagaccagaccaacatcctgagtgccctacttgttttgctccaagacagcctgctagcaacagccagttctcccaaattctcagagcttgttatgaagtgtctctggagaatggttcgactgttgcctgataccatcaatagcattaacctagacagaattcttctggatatccacattttcatgaaggtcttccccaaagagaaactgaagcaatgcaaaagtgaatttcccataaggaccctaaagaccctgctacacaccttatgcaaattaaaagggcccaagatcctggaccacctaacgatgatcgacaacaaaaacgagtctgagctggaggcccatctctgccggatgatgaagcacagtatggaccagactgggagcaagtctgataaggaaacagaaaagggagcatctcgaatagatgaaaaatcatcaaaggccaaagtgaatgatttcttagctgagatttttaagaagattggctctaaagaaaacactaaagagggactagcagagttatatgaatataagaagaaatactcagatgctgacattgaaccatttctgaaaaattcctcacagttcttccagagctatgtcgaaagaggccttcgggtgattgagatggagagggagggcaaaggtcgtatttccacttcaacaggcatctcccctcagatggaagtcacatgtgtgcccacgcccacaagcacagtgtcctccataggtaacacaaatggggaagaagtggggccatctgtctacttggaaaggctaaagatcctccgacagcgatgtggtctggacaacacaaagcaagatgaccgacctcctttgacctctttgctctccaaaccagcagttcctactgtcgcctcttccacagacatgctccacagcaaactctctcagctccgggagtcacgggagcagcaccagcattcagacctggattctaaccagactcactcttcaggaactgtgacctcctcctcctccacagctaacatagacgacttgaaaaaaagactggagagaataaagagcagtcgcaaatgaagctgccccactcccccggcaccctgcagctttagtttactaaactagaagtcctcatagtttaaaatggcctcagcaggcctagtgtatacaaactggttgtatgtatcatgccgtggagctagggggaggagtcattgtggcacaagtatttgtacatactctgcttctctctgtcagcgtcctgctgctctagaagactgtccgtggatgagtttagtgtacagacttgtaaacagctgccccctctctgctcagtctagttcccagatccttttctttttaattgctcatttgtaaaattgtcctaatctttcctagctttttaatagttaatattagaaactctttaatagttttcctttcagtttgtgagctcttctctgtcgccctgaagggtcactgtattctgtatgaatgcatggcatgatacaactaatttaagagtcttttataaataaagtttgcattaactatacctg

SEQ ID NO: 58 - DNA, 1978 bp, Homo sapiens
  ref <308>: DATABASE ACCESSION NUMBER: M23619
  ref <309>: DATABASE ENTRY DATE: 2001-06-18
gagttgtgcacccggcggagccggaggagcccggcgcacctcgccgggcggccgctcccgctggagccggagcccgagcccgagcccgagcccgggcccgggtgaggggcggggagagacacgggctgcggcgcggcaggagagtggggggtcgggcgccccccgcagctcaggacatgggagtcccaccgtattgtccaggctggtctcgaactcctgacctcaagcagtcctcctgctttggcatcccaaagtgctgggattacagcatcccagccatcactcttccacctgctccttagagaagggaagatgagtgagtcgagctcgaagtccagccagcccttggcctccaagcaggaaaaggacggcactgagaagcggggccggggcaggccgcgcaagcagcctccggtgagtcccgggacagcgctggtagggagtcagaaggagcccagcgaagtgccaacacctaagagacctcggggccgaccaaagggaagcaaaaacaagggtgctgccaagacccggaaaaccaccacaactccaggaaggaaaccaaggggcagacccaaaaaactggagaaggaggaagaggagggcatctcgcaggagtcctcggaggaggagcagtgacccatgcgtgccgcctgctcctcactggaggagcagcttccttctgggactggacagctttgctccgctcccaccgcccccgccccttccccaggcccaccatcaccaccgcctctggccgccacccccatcttccacctgtgccctcaccaccacactacacagcacaccagccgctgcaggggctcccatgggcctgagtggggagcagttttcccctggcctcagttcacagctccccccgcccacccacgcatacacacatgccctcctggacaaggctaacatcccacttagccgcaccctgcacctgctgcgtccccactcccttggtggtggggacattgctctctgggcttttggtttgggggcgccctctctgctccttcactgttccctctggcttcccatagtggggcctgggagggttcccctggccttaaaaggggcccaagccatctcatcctggcacgccctactccactgccctggcacagcaggtgtggccaatggaggggggtgctggcccccaggattcccccagccaaactgtctttgtcaccacgtggggctcacttttcatccttccccaacttccctagtccccgtactaggttggacagcccccttcggctacaggaaggcaggaggggtgagtcccctactccctcttcactgtggccacagcccccttgccctccgcctgggatctgagtacatattgtggtgatggagatgcagtcacttattgtccaggtgaggcccaagagccctgtggccgcacctgaggtgggctggggctgctcccctaaccctactttcgttccgccactcagccatttccccctcctcagatggggcaccaataacaaggagctcaccctgcccgctcccaacccccctcctgctcctccctgccccccaaggttctgggttccatttttcctctgttcacaaactacctctggacagttgtgttgttttttgttcaatgttccattcttcgacatccgtcattgctgctgctaccagcgccaaatgttcatcctcattgcctcctgttctgcccacgatcccctcccccaagatactctttgtgggaagaggggctggggcatggcaggctgggtgaccgactaccccagtcccagggaaggtggccctgcccctaggatgctgcagcagagtgagcaagggggcccgaatcgaccataaagggtgtaggggccacctcctccccctgttctgttggggaggggtagccatgatttgtcccagcctggggctccctctctggtttcctatttgcagttacttgaataaaaaaaatatccttttctgg

SEQ ID NO: 59 - DNA, 4470 bp, Homo sapiens
  ref <308>: DATABASE ACCESSION NUMBER: AJ223948
  ref <309>: DATABASE ENTRY DATE: 2001-06-18
cacaaggcttatcagattgacccaacattaagaaagcatcgagaacagttggtcattgaagttggacgaaaactagacaaagctcagatgattcgttttgaggagcgaactggatatttttcctcaactgatttgggtagaactgccagccattactatattaaatacaacaccattgagacctttaatgaactctttgatgctcacaaaacagaaggtgatatctttgccatagtctccaaagctgaagaatttgatcaaattaaggtcagagaagaggaaatagaggagttagataccttattaagcaatttttgtgaactctccactcctggaggtgtagagaatagttatgggaaaataaacatcttacttcaaacttatatcagccgaggagaaatggacagtttctcccttatatcagattctgcatatgttgcacagaatgcagctagaattgtccgtgctctttttgaaattgctctgaggaaacgttggcctaccatgacctacaggctcctgaatcttagtaaagtcattgacaagaggctttggggttgggctagccctttgagacaattttcaatcctaccaccacacatcctaacaagattagaagaaaaaaagcttactgtggataagctgaaagacatgaggaaagatgaaataggtcacattttacatcatgtgaatattggactgaaggtcaaacaatgtgttcatcagattccttctgttatgatggaagcattcattcagcctatcacaaggactgtcctccgagtgacactcagcatctatgctgatttcacttggaatgatcaggtacatgggacagtaggagaaccttggtggatttgggtagaagatcctacaaatgatcatatttatcattcagagtattttctagctctaaaaaaacaagtcattagtaaagaagcccaactactggtatttacaatccctatttttgagcctttgccttcccaatactacatccgagcagtgtctgatagatggttgggtgctgaggcagtatgtattatcaactttcaacatctaattctaccagagagacatcctcctcatacagaattactggatcttcagcctttaccaatcacagctttgggatgtaaagcatatgaagccctgtacaacttcagccactttaaccctgtacagacacaaatatttcatacattgtatcacacggattctaatgtcctacttggagcacctactggatcgggaaagactgttgcagctgaattagccattttcagagtcttcaacaaataccctacttcaaaggcggtatatattgcacccctaaaagccctagtacgtgaaagaatggatgattggaaagttagaatagaagaaaaacttggtaaaaaagttattgaactaacaggggatgtgactcctgatatgaaatccattgccaaggctgaccttatcgtcactacgccagagaagtgggatggagtcagcagaagctggcaaaataggaactatgttcagcaagtcactattctcatcatagatgagatccatctgcttggggaggaaagaggccctgttctagaggtcattgtatctcgaacaaattttatctcatcacacacagaaaagcctgttagaatagttggactatctactgcattagctaatgccagagaccttgctgattggctcaatattaagcagatgggcttgtttaacttccgaccatcagtacgcccagttccactggaagttcacattcaaggctttccaggtcaacattactgtcctcgtatggctagtatgaacaagcctgcatttcaggcaattagaagccattctccagccaaacctgttttgatatttgtctcatcaagacgtcaaactcgtcttactgctttggaattgatcgccttcctggctactgaagaagatccaaagcagtggttaaacatggatgaaagagagatggagaacatcattgcaacagtaagagattccaacctcaagctgacccttgctttcgggataggaatgcatcatgctggactacatgagagggaccgaaaaacagtagaggaactatttgtaaactgtaaagttcaggttcttattgctacaagcacattagcctggggtgtaaactttccagctcatttagtaattattaagggaacagaatactatgatggaaaaacaagacgttatgtggattttcccattacagatgtcctccagatgatggggcgtgctgggaggccgcagttcgatgaccaaggcaaagctgtaattctagttcatgacataaagaaagacttttataaaaaatttctttatgaacctttcccagtagaatcaagtttattaggagtgctctctgaccacttaaatgcagagattgctggtggtacaattacatctaagcaagatgcattggattatatcacctggacttactttttccgacgtcttatcatgaatcccagctattacaatttgggtgatgtgagccatgattctgtgaacaagtttctgtcccatctgattgagaagtccctgattgaattggaactttcctactgtattgaaattggagaggataatcgcagcattgaacctctaacttatggccgaattgcctcctattactatttgaagcatcaaacagttaaaatgttcaaggaccgcttgaagcctgaatgcagtactgaagaactgctttcaattctaagtgatgcagaagaatatacagatttgccagtgagacacaatgaagatcatatgaatagtgaactggcaaaatgtcttcccattgaatcaaatcctcattcatttgacagccctcacaccaaagcacatctcctgctacaggcacatctcagccgagccatgctaccctgcccagattatgacactgataccaaaacagtcttggaccaagctctcagagtatgtcaggcaatgctggacgtggctgcaaaccagggctggctggtgactgtcctgaatatcaccaacctgattcagatggtgatccagggtcggtggttaaaggactcttctcttcttacactaccaaacatagaaaaccatcatcttcaccttttcaagaaatggaagccgattatgaagggcccacatgctaggggtcggacctccatcgagtgccttcctgaactgatccatgcctgtggagggaaagaccatgtatttagctccatggtagaaagtgagctacatgctgcaaaaacgaaacaggcatggaatttcttatctcacttgccagtgataaatgttggcataagtgttaaaggctcgtgggatgacttagttgaaggacataatgaactctctgtctcaactctgactgcagacaaacgagatgacaacaaatggatcaaattgcatgctgaccaagagtatgtgcttcaagtgagcttgcagagagtccactttgggttccacaagggaaagccagagagctgtgcagttactcctcgatttcccaaatcaaaagacgaaggatggtttttgatattaggagaagtggataagagagaacttattgctttgaaaagagtaggatatattcgaaatcatcatgttgcttccctttctttttatacccctgaaatacctggaaggtatatctacacattatatttcatgagcgactgctaccttggcctggaccagcagtatgacaatctatctcaacgttacacaagcgagtctttctgcacaggtcaacaccaaggtctctgattccctgactgacctggcattaaagtaacttgacctgaacaatccatttgaaaggagtggctaagaattctctctgttcagtcatctagacaaatcgaattacttgatgtttgccttgaaagaatcaacttctaacctcaaccatccaggaaattgacagtggctgcagtattgactccagtgacataaagttaaccacagtggccttttaacaaatgttgccttttataatgttatctttatgagtttcttgatatgtaagatgaaaaagcatttagaataatcttttaatttgtgtatatttgggatgatatttaggagctatcaatcaaattttacatctcacaatgtactgtttacatggatattggctgctttttttaaggaaaaccacattgagatgtgacaagtgttaggacttgtcacagatttctaactctgccgcataaactataaatctgtaaggtggtacacagcgtgtcttgttagcaaaatttatactttgatatgatcacatgtagaagtagcttcaagaatttcttgtagtcataaatgtttaataatatatgatgtaaaattatattatggagcctaatgatgataacaaagaaaacaatatactgatcttagaaaatgtagacatggttaactgggaaataaaatatagagtggcacttcaagacaaaaaaaaaaaaa

SEQ ID NO: 60 - DNA, 423 bp, Homo sapiens
  ref <308>: DATABASE ACCESSION NUMBER: AI214598
  ref <309>: DATABASE ENTRY DATE: 2001-06-18
acctacatagcacatgactggggggataaagcatgtataagttgggagagggtaaagaatgtgtgactatgtatacagaaaatagactaaaatgtgcagcaaaatgatatatactgtaatctggtttttgaagtatctactattctggaatattgttaaacaactttttgcttttgaaaaaaaaaggtgccttgattcacttgcgtgacttagaacattcatcctattttattgtgatttttaatgtcttctgaccccaaactgtgtttttggttgcagtctggcggctgcaggcatagcgtcggttttgttccaataacagagaccaaagagttaatcagatatggttcagctgctacaattgtatgattcaaaggcaatttaatcaccccaaatttccatggccgccacagtcaagacctg

SEQ ID NO: 61 - DNA, 1450 bp, Homo sapiens
  ref <308>: DATABASE ACCESSION NUMBER: J04991
  ref <309>: DATABASE ENTRY DATE: 2001-06-18
gttggtgctcagagtgtggtcaggcggctcggactgagcaggactttccttatcccagttgattgtgcagaatacactgcctgtcgcttgtcttctattcaccatggcttcttctgatatccaggtgaaagaactggagaagcgtgcctcaggccaggcttttgagctgattctcagccctcggtcaaaagaatctgttccagaattccccctttcccctccaaagaagaaggatctttccctggaggaaattcagaagaaattagaagctgcagaagaaagacgcaagtcccatgaagctgaggtcttgaagcagctggctgagaaacgagagcacgagaaagaagtgcttcagaaggcaatagaagagaacaacaacttcagtaaaatggcagaagagaaactgacccacaaaatggaagctaataaagagaaccgagaggcacaaatggctgccaaactggaacgtttgcgagagaaggataagcacattgaagaagtgcggaagaacaaagaatccaaagaccctgctgacgagactgaagctgactaatttgttctgagaactgactttctccccatccccttcctaaatatccaaagactgtactggccagtgtcattttattttttccctcctgacaaatattttagaagctaatgtaggactgtataggtagatccagatccagactgtaagatgttgttttaggggctaaaggggagaaactgaaagtgttttactctttttctaaagtgttggtctttctaatgtagctatttttcttgttgcatcttttctacttcagtacacttggtgtactgggttaatggctagtactgtattggctctgtgaaaacatatttgtgaaaagagtatgtagtggcttcttttgaactgttagatgctgaatatctgttcacttttcaatcccaattctgtcccaatcttaccagatgctactggacttgaatggttaataaaactgcacagtgctgttggtggcagtgacttcttttgagttaggttaataaatcaagccatagagcccctcctggttgatacttgttccagatggggcctttggggctggtagaaatacccaacgcacaaatgaccgcacgttctctgccccgtttcttgccccagtgtggtttgcattgtctccttccacaatgactgctttgtttggatgcctcagcccaggtcagctgttactttctttcagatgtttatttgcaaacaaccattttttgttctgtgtcccttttaaaaggcagattaaaagcacaagcgtgtttctagagaacagttgagagagaatctcaagattctacttggtggtttgcttgctctacgttacaggtggggcatgtcctcatccttcctgccataaaagctatgacacgagaatcagaatattaataaaactttatgtactgctgtagc

SEQ ID NO: 62 - DNA, 518 bp, Homo sapiens
  ref <308>: DATABASE ACCESSION NUMBER: AI691084
  ref <309>: DATABASE ENTRY DATE: 2001-06-18
tttttttttttttcacagcacaaaatttattgagattagttactaaataactgatatacatccaacatcactgaatggaaataatttaaaaataagcaaggcttaaattggggtctttcaaaaaactcaaaacattcttggtgactgtatctttaacaaatggaatgacaaaactagttaagtcatattatctcaatcaactccaaaactcaatgttgccaacatgtttttctacttaaaagccaacaaaaaggcaaagcctcataatttagtaattaccatgtttcttggtttctgttctcaaatgccacagaaagatacctgatgaaaggaagcaaagcacctagtctcatcagtcttcttcaaaactttaaggttgctttcacaatctcactataaatatttagattcctatctgacagatttcttcacttatgtgagtaggaatgctctcgaaaccttagtctttactcttgcttcatactagagctgtttgattaaaccacctctgtatttgc

SEQ ID NO: 63 - DNA, 5257 bp, Homo sapiens
  ref <308>: DATABASE ACCESSION NUMBER: AB011124
  ref <309>: DATABASE ENTRY DATE: 2001-06-18
cgcttgtgggccggccttgggggagggggacgcgcacccacagaaggactcagagggcttcacggtaagctgagcagggtcaaggtccacagggagcgggagagggtagtaatccgggaagtcttcctggtggcagtgaattctttgcggggttcggcaggcgcaggatccttggggccgcgcaccctgcagcggcccctcccctcccctcccccctcccacctgtgggaaacgcaggccctgagagaggctccgtcagtgccagcagctggcgccactgcgtcccctgccccggcctcagccagccctgggacctctgcggaggactgatcccgggaagggggccctgtcttcccagggccccggtgcggccgagctgggaagaccttggggagggcaggcctgccacctactgcagccgcggcccccgtccatccgcgagggacaggctgtgcccttggcggcgcccacccgcgacccagatgtgtgtcgcctacccaccctcccccagacccccgtttcctcaggcgctcgccgcctcggggcgcctggcacgcggcagccccgcaaggtaggtccttcattcctcccatttcgcagaggagaaaactgcagtccgggatggctcagtcggcccctccaaagtcgcgcagctggttcgggccgagccccgactgcgagagtgaggcacatggcccctgcagaccgggcctcggagggtcccaggcttgaggacccgtcggcccctcaaccccttggaaaggcaaggagagaagcctgcgctggtagtgagcttccacttctgccctgactgcaacacttaggttagggggctgggaaggacccccaccctcaatttttggataggggtgtatttctctccctcccctaatttctgaggttggttccctgttggattcaggtactgctctccccttccaaccccatttccccagcccatgaggttgggatattagggtcccagacccaagataaagaaccccaaaattctggggttgcagcaaagagttgagagggtcactgagcctgggaagctcatggcggaggtggggctaaggcagaagtttaggaatggaacgctgagctgagctgagctgagctgagctgagctgagctgagcaacgctgggggctatgtgcatggagccctgggggttgggctttatcaggtgggcaacaggcagcccccattcccaagttctctcttttatcccagccttattccttcaccttggatgcctgggaactttttgtacccattgtagggaaggggacactgaggggcagagcggtgccgggttgacttggctggggtggtgggaataggagtagggtcttacctatctctgccttcccacctgtgcccacagtgcccccctggcttagtcatggcgaagctggagacgctgcctgtgcgcgctgacccagggcgggaccctctcctggcctttgccccacggccctccgagcttggacccccggacccccgcctggccatgggcagcgtgggcagtggggtggcccatgcccaggagtttgccatgaagagcgtgggtacccgcacagggggtgggggcagccagggcagtttccctggcccccgaggcagtggcagtggggccagcagggagaggccgggccgctacccctcagaggacaagggtctcgccaactccctctacctcaatggtgagctgcggggcagtgaccacaccgatgtctgtggcaacgtggttggcagcagcggaggcagcagcagcagtggtggcagtgacaaagccccaccgcagtatcgtgagcccagccacccacccaagctcctggccacctctggcaagctagaccagtgctcagaaccactagttcggccgtcggccttcaagcctgtcgtacccaagaatttccactccatgcagaatttgtgccccccgcagaccaatgggactcctgagggacggcagggccctggtggcctcaaaggcggactggacaagtctcggaccatgactccagcgggtgggagtgggagtggcctctcagactcaggccggaactccctcacaagcctgcccacctacagctccagctacagccagcacctggcacccctcagtgcctccaccagccacattaaccgcattggcactgccagctatggtagtggtagtggcggcagcagcggtggggggtcgggctaccaggacctggggacctccgatagtggacgggcctccagcaagagtgggtcgtcgtcatctatggggcggccaggccacctgggctctggggagggcggaggtggaggcctgcctttcgcggcctgctcaccgccctcccccagtgcactcatccaggagctggaggagcggctgtgggagaaggagcaggaggtggcagctctgcggcgcagcctggagcagagcgaggcggctgtggcccaggtactggaggagcggcagaaggcgtgggagcgggagctggccgagctgcggcagggctgcagcgggaagctacagcaggtggcccgacgtgcccagcgcgcccagcagggcctacagctgcaggtgttgcggctgcagcaggacaagaagcagctgcaggaggaggcggcccggctgatgcggcagcgggaagagctggaggacaaggtggccgcctgccagaaggagcaggccgacttcctgccccggatagaggaaactaagtgggaggtgtgccagaaggctggcgagatctccctcctgaagcagcagctgaaggactcgcaggcggatgtgtcgcagaagttgagtgagatcgtgggactgcgctcgcagctgcgggagggccgggcttcgctgcgggagaaggaggagcagctgctcagcctgcgggactccttcagcagcaagcaggccagcctggagctgggcgaaggcgagctgcctgccgcctgcctcaagccggcgctgacccccgtggacccggccgagccacaggatgctctggccacctgcgagagcgacgaggctaagatgcgccgtcaggccggggtggccgctgccgcctccttggtttccgtggacggggaggcggaggctggcggggagagcgggacgcgggccctgcggcgggaggtggggcggctgcaggccgagctggcggctgagcggcgggcccgggagcgccagggtgccagcttcgccgaggagcgccgcgtgtggctggaggagaaggagaaggtgatcgagtaccagaagcagctgcagctgagctacgtggagatgtaccagcgcaaccagcagctggagcgcaggctgcgggagcgcggggccgcagggggtgcaagcacgcccactccccagcatggcgaggagaagaaggcctggaccccctcccgcctcgagcgcattgagtccacagaaatctgatcgacctgggcactcggcattttgacacatgtcctgtcaaaaggccagagtccccagtgtcccctcccctccatctctcttccccatagaccccataaccccagaccaaagaggttctctaagcagctgtgaccaggttcctccctccccacctgccctcctagctccagcactgcccccgtggcagcccacttggacccccctaaaaggagggaataggaggagggcagggtgagtgggggcaatcctaggtggtgggggagtcatgctccctttctcggcacccccttgttggagatggaggcagcagacgtgcagtgccataaggtgccccagtccttctggaggcctgggctgctactgttggccaccctgtgtctagtgatgctctctgtgctcacctcctaggccatggagcctgagggggcctgcaccgggtttgctgaaactgacagagcctgggctccagacctctctccctcctacagtgctctccctccctgggcagattggcaggacaagtgggagcagatggcctgcctttggctgagagggctacctgcccagcccctcccccaacaagatctcttggactcaggcctcagagcctggcctggttgtgagtgtgtgtccctgtgtgtgtgttgcgggaggggaggactggggctggaagtccagcacccagggaagatctgtcctcctgttcttgggaagcgttgcctgacggcttctcggctctaccctcacccttctggccaggatcccgcagggcaacagccccatctgcttggctgaccccacacccaggaccactgtccggctctaacacagctattaagtgctacctgcctctcaggcactctcctcgcccagtttctgaggtcagacgagtgtctgcgatgtcttcccgcactctattcccccagcctctttctgctttcatgctcagcacatcatcttcctaggcagtctcttccccaaagtctcaccttttcttccaatagaaaattccgcttgacctttggtgcactgcccacttcccagctccactggcccaagtctgagccggaggcccttgttttgggggcggggggagagttggatgtgattgcccttgaagaacaaggctgacctgagaggttcctggcgccctgaggtggctcagcacctgcccagggtaggcctggcatgaggggttaggtcagccaatgtcagctgcttctcttggggccctctcagagtctatctccccaagacaggaagggaaaagcaaatttctaattcaccagcaataaaaattggaggaggcttggccctcagcccttatatctctctctttttcactctcttcctcccacccccaagactgagttttggggggcaaggtggagagagctggcaactactgtgagcaagtcccctagcccctgaccagcctcctcccatgactggtgactgtttaatgagctgtgcatcccccacaaaaacatgagtgcccctctgtgtggcctctaaccctctgcacagcccttctgggtggtcctcaccaggtctctgagctgggtgggaggccatcctggcgaccactgcccattccattcacccctcactgtacctgccctagaacctgggcctaggccacaggggcagggagaagagaaggcattagtaagaaaaaaatagaaaaaaatatgaacagactcagctttgggacgtccaaccacaaaagaaattatatataaatatatataaatatatatctctaccatatgtgatggaaagactttttgttttcctttcccaaagaaataaaacggaaaaagcctc

SEQ ID NO: 64 - DNA, 537 bp, Homo sapiens
  ref <308>: DATABASE ACCESSION NUMBER: AA669106
  ref <309>: DATABASE ENTRY DATE: 2001-06-18
ttttttttttgtgaaaaacatttattctgagaatctaaaatctggacaaagtactggactttagaaaaagcctacacaaaattgtctcattcttccctaatacattaataatctaagaataaggaggtgaaaaaaaccctttaaaaataacattgctccagtttgtctgcaggtatgtgatttaaaatatccctgttttattgaggtataggctgcaaactttggtaaaattagaaaaattaacaaaccctttcaaaagaaaaaaaatacaaaaacaaaaacaaccaaaccctaacgttatatctttcttggtacatatacagtaactacaaaaaaaattcatttagaaaatgtgttcattaagagaaaaaaaaaataaaaaaaaaccctcttgtaagttctcacttgctgagttaaaaaaattgaatgtaaatgatctataaggctcaaacggttcccaagcacccatccggtgtcaggaagaactggatgaccgcagtttctagaatctggttgacattttcaataattcagtgc

SEQ ID NO: 65 - DNA, 2490 bp, Homo sapiens
  ref <308>: DATABASE ACCESSION NUMBER: U09086
  ref <309>: DATABASE ENTRY DATE: 2001-06-18
gttcgtagttcggctctggggtcttttgtgtccgggtctggcttggctttgtgtccgcgagtttttgttccgctccgcagcgctcttcccgggcaggagccgtgaggctcggaggcggcagcgcggtccccggccaggagcaagcgcgccggcgtgagcggcggcggcaaaggctgtggggagggggcttcgcagatccccgagatgccggagttcctggaagacccctcggtcctgacaaaagacaagttgaagagtgagttggtcgccaacaatgtgacgctgccggccggggagcagcgcaaagacgtgtacgtccagctctacctgcagcacctcacggctcgcaaccggccgccgctccccgccggcaccaacagcaaggggcccccggacttctccagtgacgaagagcgcgagcccaccccggtcctcggctctggggccgccgccgcgggccggagccgagcagccgtcggcaggaaagccacaaaaaaaactgataaacccagacaagaagataaagatgatctagatgtaacagagctcactaatgaagatcttttggatcagcttgtgaaatacggagtgaatcctggtcctattgtgggaacaaccaggaagctatatgagaaaaagcttttgaaactgagggaacaaggaacagaatcaagatcttctactcctctgccaacaatttcttcttcagcagaaaatacaaggcagaatggaagtaatgattctgacagatacagtgacaatgaagaaggaaagaagaaagaacacaagaaagtgaagtccactagggatattgttcctttttctgaacttggaactactccctctggtggtggattttttcagggtatttcttttcctgaaatctccacccgtcctcctttgggcagtaccgaactacaggcagctaagaaagtacatacttctaagggagacctacctagggagcctcttgttgccacaaacttgcctggcaggggacagttgcagaagttagcctctgaaaggaatttgtttatttcatgcaagtctagccatgataggtgtttagagaaaagttcttcgtcatcttctcagcctgaacacagtgccatgttggtctctactgcagcttctccttcactgattaaagaaaccaccactggttactataaagacatagtagaaaatatttgcggtagagagaaaagtggaattcaaccattatgtcctgagaggtcccatatttcagatcaatcgcctctctccagtaaaaggaaagcactagaagagtctgagagctcacaactaatttctccgccacttgcccaggcaatcagagattatgtcaattctctgttggtccagggtggggtaggtagtttgcctggaacttctaactctatgcccccactggatgtagaaaacatacagaagagaattgatcagtctaagtttcaagaaactgaattcctgtctcctccaagaaaagtccctagactgagtgagaagtcagtggaggaaagggattcaggttcctttgtggcatttcagaacatacctggatccgaactgatgtcttcttttgccaaaactgttgtctctcattcactcactaccttaggtctagaagtggctaagcaatcacagcatgataaaatagatgcctcagaactatcttttcccttccatgaatctattttaaaagtaattgaagaagaatggcagcaagttgacaggcagctgccttcactggcatgcaaatatccagtttcttccagggaggcaacacagatattatcagttccaaaagtagatgatgaaatcctagggtttatttctgaagccactccactaggaggtattcaagcagcctccactgagtcttgcaatcagcagttggacttagcactctgtagagcatatgaagctgcagcatcagcattgcagattgcaactcacactgcctttgtagctaaggctatgcaggcagacattagtcaagctgcacagattcttagctcagatcctagtcgtacccaccaagcgcttgggattctgagcaaaacatatgatgcagcctcatatatttgtgaagctgcatttgatgaagtgaagatggctgcccataccatgggaaatgccactgtaggtcgtcgatacctctggctgaaggattgcaaaattaatttagcttctaagaataagctggcttccactccctttaaaggtggaacattatttggaggagaagtatgcaaagtaattaaaaagcgtggaaataaacactagtaaaattaaggacaaaaagacatctatcttatctttcaggtactttatgccaacattttcttttctgttaaggttgttttagtttccagatagggctaattacaaaatgttaagcttctacccatcaaattacagtataaaagtaattgcctgtgtagaactacttgtcttttctaaagatttgcgtagataggaagcctg

SEQ ID NO: 66 - DNA, 565 bp, Homo sapiens
  Modified_base 1 ... 565: n = a,c,g, or t
  ref <308>: DATABASE ACCESSION NUMBER: AI535884
  ref <309>: DATABASE ENTRY DATE: 2001-06-18
gatgcatggaantttggcacgngtgtccacccgtccnggccccctgtnttgtaaaaaggggaggagaattagccaaacacatgtaagcttttaagaaaaacaaagttttaaacgaaatactgctctgtccagaggctttaaaactggtgcaattacagcaaaaagggattctgtagctttaacttgtaaaccacatcttttttgcactttttttataagcaaaaacgtgccgtttaaaccactggatctatctaaatgccgatttgagttcgcgacactatgtactgcgtttttcattcttgtatttgactatttaatcctttctacttgtcgctaaatataattgttttagtcttatggcatgatgnatagcatatgtgttcaaggtttatagctgttgtgtttaaaaattgaaaaaaagtgggaaacatctttgtacaatntaagccatgtaattataaataaggaaaaaaggttntgtagtaatgnaatngctaaaaataatancaattgnccagggncccaaaggggcaggcattnccttattnnaaaaaggnnaaggntt

SEQ ID NO: 67 - DNA, 2913 bp, Homo sapiens
  ref <308>: DATABASE ACCESSION NUMBER: D42054
  ref <309>: DATABASE ENTRY DATE: 2001-06-18
acgagaacctagaccgcccccgaagtgcggagaccccctgggcaggctgaaagatggcggcggcgtctgtctctgcggcttctggttctcacttgtcgaacagctttgctgagccatcaaggtctaatggaagcatggttcggcattcttcatctccatatgtagtatatccttcggataagcctttccttaatagtgatctacgacgctccccaagtaagcctacacttgcctatccagaaagcaacagcagagccatattttctgctcttaagaatcttcaagataagattcgacgcttggaacttgagaggattcaggcagaagaaagtgtgaaaaccttgtctagagaaacaattgaatataagaaagtactggatgaacagatacaagaaagggagaattcaaagaatgaggaatcaaagcacaatcaagaactgacatctcagttgttagctgcagaaaataaatgcaatctattagaaaaacaattggaatacatgcgaaatatgataaagcatgccgaaatggagaggacatctgtcttagagaaacaagtttccctagaaagagaacgacaacatgatcaaacacatgttcagagccaacttgaaaaattggatcttcttgaacaggagtataacaaacttaccacaatgcaggcccttgcagaaaaaaaaatgcaagagttggaagcaaaactccatgaagaagaacaggaaaggaaacgcatgcaagctaaggcagctgagttgcagactggtctagaaacaaatagacttatctttgaagataaggcaactccgtgtgttcccaatgcaagaagaattaaaaaaaagaagtcaaaaccaccagaaaagtccacaagccctagccatgccgtggtagccaatgttcagcttgtcttgcatctaatgaagcaacacagtaaagctttgtgcaatgatcgagtcatcaacagtattcctttggcaaagcaagtatcttcacgaggtggtaaaagtaagaagttgtcagtaacacctccctcctccaacggtattaatgaggagttgtcagaagtcttacagactttacaggatgaatttgggcaaatgagctttgatcaccagcagcttgcaaaacttatccaggagtcgccaaccgttgaactgaaagacaagttggagtgtgaattggaggcattagtgggaaggatggaagcaaaagccaaccaaataactaaagttcgaaaataccaagcccagctggagaaacagaagttagagaagcagaagaaggaattaaaagctaccaaaaagactcttgatgaagaaagaaacagcagcagccgttctggaatcacagggaccacaaataagaaagattttatgaaacagagacctggagaaaaaaggagaaaaaatcttcagttattgaaggacatgcaaagcatacagaattcattacaaagcagtagtttgtgttgggattactgactcataaccaggtcagaaattttattcagataatctgtacctcatcaatcagatgatgacaatttacttcccaggtctcatactcacttatgttggaattaattaatagcaggtgttaaaggacccaggcttcattacacaggcttttcatgtatgcaggatgactcaatgttaaagcatttaaatggaaaccaggggagttttaaagcccgagaaaccacacataatcttttgttgagatgagtttgctgtactgacgctgcactttgtaaacagattaccagttttttacttgtgggtgtgattttttaaaatagttctttatatataattaaaattaggtttaaattttcaaaatatgagactatgctataggcagtgcttgcttgaaaagtctcatttttaaatctccctggcatgaggtgcccacttcccctttccaaagcaaccattaaacatactttgtttctactattggtggagtttttctatatttaaaaatacatatatatttcagaggatttttattttgctttttggcatttcagactttgatcagtgttaagtgcacttgtattgctttttaatctgttaattttttaaagacccaagcagtcattttgagttatatctataaaaattataaaaggatttttgaaagtataaacaaattgtcagtgaaataaatgagattttggaataaagtgagaatgggagaagggatatgttgtgagcatataccttcacagttcttaatacctgttttgtaatcatgatattcagtcaaggcattatggtttttaatcttgaaacttagagaaccctttgaatatttgcttttactggtgtacagtatgagtggaatataaactgtacacataattatcatgttgatataaatcataatttcaactagatcaagacatgttaaccttttataaatttaaagtcaataaagcacctttttaaaggaaacactgcaactttccttaacagcctgttaataaaggctttgtgacaagctctcaaaaaatgcatttctaaataggaggacatcaatgtattgatgaagagaaaaaactagtacttagttgccacactcatgcttacatagaaagagagcccaagaatattagatttcctcatgatacaagatactacagtaacaggctttaatttaggatccttaagattttggggtattatttgtgactctcctgaaattgtaaacttgtgcttctgtgtccagttttctaatgagtaggttcgtagcttgattgaattaataattgtgagcccatagacacaagggaagtgagaaacagtgctctggtgacatgataaatatatgtgtcaaccaccatttcagctattaaaaactcctgttatctccttgtttgaatttcaggtcattaaattgtataaccatcatttg

SEQ ID NO: 68 - DNA, 652 bp, Homo sapiens
  Modified_base 1 ... 652: n = a,c,g, or t
  ref <308>: DATABASE ACCESSION NUMBER: N32858
  ref <309>: DATABASE ENTRY DATE: 2001-06-18
atattgttatctatgttacattgtttattcaatatagaaaaaatatgaatacattcatagtattctcttttaatttggtaattccacattgtcaaatattgactgtttttatattgggtgtcctacccaattaaaaaaaaaaagaggaagaatgacctggcagacagttcttgttgtgccatgttattgatataacagcaatatcatatatgtctctttttttaaacacctagttttgaaaagaccaatgattaaactactgtttactggctcagggaaatgttttaagaaatagaaattaattcattctctccccaagaaaaactttaaggtaaacatcttaaaacacctaagtgatgaaggagaaaatttgtattccttaaaaaggggtcagtgctgaaagaaaattggcatggtagaccccactggcacaacggttctgcaccaaaggaaaatgaggaccntattaacntaattatggtggagagangaaacccncacttagaagtccgggttcctttaaacnccctggttaccaatagaancatggntatatccccgacntataatggggccaacncccaaatcngtgcnaccaattccgnattttccctcnctttaggtggaaggtccccatggtccgaaggtatcc

SEQ ID NO: 69 - DNA, 1441 bp, Homo sapiens
  ref <308>: DATABASE ACCESSION NUMBER: S43127
  ref <309>: DATABASE ENTRY DATE: 2001-06-18
cgttaggaggagctaggctgccatcgggccggtgcagatacggggttgctcttttgctcataagaggggcttcgctggcagtctgaacggcaagcttgagtcaggacccttaattaagatcctcaattggctggagggcagatctcgcgagtagggcaacgcggtaaaaatattgcttcggtgggtgacgcggtacagctgcccaagggcgttcgtaacgggaatgccgaagcgtgggaaaaagggagcggtggcggaagacggggatgagctcaggacagagccagaggccaagaagagtaagacggccgcaaagaaaaatgacaaagaggcagcaggagagggcccagccctgtatgaggaccccccagatcagaaaacctcacccagtggcaaacctgccacactcaagatctgctcttggaatgtggatgggcttcgagcctggattaagaagaaaggattagattgggtaaaggaagaagccccagatatactgtgccttcaagagaccaaatgttcagagaacaaactaccagctgaacttcaggagctgcctggactctctcatcaatactggtcagctccttcggacaaggaagggtacagtggcgtgggcctgctttcccgccagtgcccactcaaagtttcttacggcataggcgacgaggagcatgatcaggaaggccgggtgattgtggctgaatttgactcgtttgtgctggtaacagcatatgtacctaatgcaggccgaggtctggtacgactggagtaccggcagcgctgggatgaagcctttcgcaagttcctgaagggcctggcttcccgaaagccccttgtgctgtgtggagacctcaatgtggcacatgaagaaattgaccttcgcaaccccaaggggaacaaaaagaatgctggcttcacgccacaagagcgccaaggcttcggggaattactgcaggctgtcccactggctgacagctttaggcacctctaccccaacacaccctatgcctacaccttttggacttatatgatgaatgctcgatccaagaatgttggttggcgccttgattactttttgttgtcccactctctgttacctgcattgtgtgacagcaagatccgttccaaggccctcggcagtgatcactgtcctatcaccctatacctagcactgtaacaccacccctaaatcactttgagcctgggaaataagccccctcaactaccattccttctttaaacactcttcagagaaatctgcattctatttctcatgtataaaactaggaatcctccaaccaggctcctgtgatagagttcttttaagcccaagattttttatttgagggttttttgttttttaaaaaaaaattgaacaaagactactaatgactttgtttgaattatccacatgaaaataaagagccatagtttcaag

SEQ ID NO: 70 - DNA, 4638 bp, Homo sapiens
  ref <308>: DATABASE ACCESSION NUMBER: AB020637
  ref <309>: DATABASE ENTRY DATE: 2001-06-18
cgcccagcctgcagagctcgcgccgcggcagcccagccgctcggccccgccgcgctcgcagaggccgccatgggcaccgcgcgctggctcgcgctgggcagcctcttcgccctggctgggctgctggaaggccggctcgtgggcgaggaggaagccggctttggcgaatgtgacaagttcttctacgccgggaccccgcctgcggggctggcggccgattcccacgtgaagatctgtcagcgcgcggagggtgctgagcgcttcgccaccctctacagcacccgggaccgcatccccgtgtactccgcgttccgcgccccgcgccctgcgcccggcggcgccgagcagcgatggctggtggagccgcagatcgatgaccccaacagcaaccttgaggaggcgattaatgaggcagaggccatcacctctgtgaacagcctgggaagcaagcaagccttgaatacagattaccttgattctgattaccaaagaggacagctttacccattctcccttagcagtgatgtccaggtggccacatttactctcacaaattcagccccaatgactcagtccttccaggaacggtggtatgtgaatctccacagcctaatggaccgggctttgaccccacagtgtggcagtggggaagacctatatatcctcacaggcacagtgccctcagactacagagttaaagacaaagtggcagtccctgagtttgtttggctggcagcctgttgtgctgtccctggaggaggctgggccatgggctttgtcaagcacacccgggacagtgacatcatagaagatgtgatggtaaaagatcttcagaaactgcttccatttaaccctcagctgtttcagaacaactgtggtgaaactgagcaagacacagagaaaatgaaaaaaatcctggaagtggttaaccaaatccaggatgaagaacgaatggtacaatctcaaaagagttctagtcccctttctagcaccaggagcaagaggtctactctgttgcctccagaggcatctgagggaagtagtagctttttgggaaaactcatgggcttcattgctaccccattcatcaagctttttcaattaatttattaccttgtggtagcaatcctgaagaacattgtctatttcctgtggtgtgttaccaagcaggtgattaatggcatagaaagttgcctttaccgcctgggctcagccaccatctcatacttcatggccattggggaagagttggtgagcattccctggaaggtgctcaaggtcgtggccaaagtcatcagggctctcctccggatcctttgttgtctgctgaaggccatttgccgagttctgagcatccctgtccgtgtccttgtggatgtggccactttccctgtgtacaccatgggcgctattccaattgtttgcaaggacattgcactgggccttggtggcactgtctcactgctctttgacactgcttttggtaccctgggtggcctatttcaggtggtttttagtgtctgcaagcggattggctacaaggttacttttgacaattctggggagttataaactcaaaaaactaatagtatccagtcacagtgaatttgaaagctggaatagtttgtctttacaatgggtttctgttcactgtcagttatcattatattttggcctttggtggggatgtctgcttgtttttgcaaaagaagatggcagaatttagacttgacagaggagaaatgctcagggtgagattaggtgtagtaatctgctgtttacctccagttatatgtgcaaactcccaagccactaataacttcagttatgcactctaacacagacgaccacctgaaatgcactggtatttatttctgataattaaaaattacaggggagggaagaactagaaaaagaacaactttagaccaaaggtgtctgagaaaaggagaaagggagcttgttcttcccattgctctttgtgatttaaggcaaaacagattaaaaaaaaaatatgcagccaatttcttggcatttgcttctctttctcctcaactcgactgaccttggtggaatgcagataatgcctctttgttgaaataactttgtgggaatgtacaattttctatatctcttagctttccgtggttctcaaggatatgtacagttttcattttcctccaaagttgaattttgctacatttttcttttaggtaatgataagcattttttaaaaaatcatttttaggtaatggtaagcattttatgccaaatgtggcataacagagtttgaattgaagggcaaagttttcttttctttttttttttttggccccttgaatggtataatacagtcctctccggtggaaagaagagaagagaaggtggacagccctgctcttagtaggtgctgcagatccaaggacatcttttgtccagcttggattaacttgacgtgtatccctgcctgacaaggttgaactgaaagatctatatgttaagctaacatgaaaattcatattctgcaacatagtagatttttctaatgcatgaaataagtacccagcacagtaaaaatactctgacttatgtccctaaatggttgttttgatacaactatatagaaaagagccacaaaataaagataaaagttattgtggccatctctgaaaaaaatatataaaatatttaagaagaattatatcttaggaaattatttttacagtgtgtttgaggctacaaacataactcccccattaatacaaattaaatgtgagagctcattctcaaaatttttttgatcaagcacttgtcattttaaatcttgcactaaaaaatggtaacaagagggaccaaactttgcttcccacaattgggatggaatcacctggatttttctgaatgttttaaagaattgctgagaggtagaaacagccaagtatgaaatactgatcttggggctaccgcccaggatcaatcagaaagttatatgcaaaaattcggggtcccaacaaggagagaacaatatgtcaaccatttgcatggggtcgatggatgagaaacatgagcgtagcaagagttacattttgcagaaaaatagcggaggcacacccagagtagaagagcagccagcaagctgccatcctgatcaatttgtgatgcaaggttagggagtatgagcaccgcatgggtccatgctagggagatgtgcaccaggcttagctaagaaacttaaagcagtattttaccaactcttgtcttagggagcataaagtttggatgtccctttatttcagcagtgtgaaggtaaatggaagggtgagggtttgacttggtactgattggtcaagaatcctgctggataaagaaaaggaattttagaagtgaccagagggacagtccagccaaactattatttgataaggaacccaaggccctgggaggcaacaggctagcccttagtttcatggctagctgagagcagattaggagccaacgttgtttgcacatgtcccatcacacctgagatgtcagacatgggaagttcgtgctattattcagttgcctctctggaccatggcaagatttcctcattcatcaaacagactccaggccctgacaaagcagttggatttggcatgtgtgatgaaaacaattagccatccatgtacaacattatgcttactgcatcccatggaaacttaattccctcctagcacatatttgcatactgaaaggtccgaaaagggcatccacggcagcttgagccccttagcaccatgtaaggagcacagcatccaaacggcttcttgagaaccattggggaatgtctttctttttcacatccaattgtttagtgtctatttattcttgggtggccagttttgaaacctaaaaagggacaataaagcaaaaagtatcagtaaggataggtggctgagacccactgccctgagctactagtgtggctgtgcctgtgggtctctagaaccatctgcattggacgtgaagccacagcaggtggctggactgctggcctgttcctaatgagctacgctgggctttgaggtagaggttggggtttatgaaccccaactctggcttaaagatcttgctgtggctctgttatgttctgaggccttgggattagcctcttcctcattacggagctgattttctagtctgtggatcagctatgcctttggacacttctcttttccattgtgccttttgaatgttgtcttctcactcagcatcagcacttcgatctaaatgcagactagggagttgggaggaggaaccaaagtgaaccatccttcatttattcagtcattcgttcatctgtcaaacacgtatttggacatcaaggttgcagagatgaacaatgcatggatttcatctttgaggagttcaaaacctagtggagagaacacatggtacaatcgtaacacatgaaggacaagtaagtgctgcagtaaaggtactaataacatgttccttggaacagaggaagaaaaaccacgaaaccatggaaattagggaagcctttacagagggtgtgacaaaactcaatttgacattttcaagctatgtacaatgatgtgcaccttgcagatgctcaataaagtaattactgac

SEQ ID NO: 71 - DNA, 2011 bp, Homo sapiens
  ref <308>: DATABASE ACCESSION NUMBER: AF029893
  ref <309>: DATABASE ENTRY DATE: 2001-06-18
gcggtaaatccgggcttgcggccgctggcgtagtctgtggccgggtggtcgttgctgcgcgccccgagccccgagagccatgcagatgtcctacgccatccggtgcgccttctaccagctgctgctggccgcgctcatgctggtggcgatgctgcagctgctctacctgtcgctgctgtccggactgcacgggcaggaggagcaagaccaatattttgagttctttcccccgtccccacggtccgtggaccaggtcaaggcgcagctccgcaccgcgctggcctctggaggcgtcctggacgctagcggcgattaccgcgtctacaggggcctgctgaagaccaccatggaccccaacgatgtgatcctggccacgcacgccagcgtggacaacctgctgcacctgtcgggtctgctggagcgctgggagggcccgctgtccgtgtcggtgttcgcggccaccaaggaggaggcgcagctggccacggtgctggcctacgcgctgagcagccactgccccgacatgcgcgccagggtcgccatgcacctcgtgtgcccctcgcgttacgaggcagccgtgcccgacccccgggagccgggggagtttgccctgctgcggtcctgccaggaggtctttgacaagctagccagggtggcccagcccgggattaattatgcgctgggcaccaatgtctcctaccccaataacctgctgaggaatctggctcgtgagggggccaactatgccctggtgatcgatgtggacatggtgcccagcgaggggctgtggagaggcctgcgggaaatgctggatcagagcaaccagtggggaggcaccgcgctggtggtgcctgccttcgaaatccgaagagcccgccgcatgcccatgaacaaaaacgagctggtgcagctctaccaggttggcgaggtgcggcccttctattatgggttgtgcaccccctgccaggcacccaccaactattcccgctgggtcaacctgccggaagagagcttgctgcggcccgcctacgtggtaccttggcaggacccctgggagccattctacgtggcaggaggcaaggtgcccaccttcgacgagcgctttcggcagtacggcttcaaccgaatcagccaggcctgcgagctgcatgtggcggggtttgattttgaggtcctgaacgaaggtttcttggttcataagggcttcaaagaagcgttgaagttccatccccaaaaggaggctgaaaatcagcacaataagatcctatatcgccagttcaaacaggagttgaaggccaagtaccccaactctccccgacgctgctgagcccttccctcccctaatctgagaagtcagcctcttggctcctcaggccaccatttaggcctgactggggtaagaaatgtcgctccactttacagaggtagctgtggtgttgaaacactggacttggatatggggtgctgggatcgattcctagctttaccactaactagctgtgtggccttgagtaaatcccgttacctctctgagcctcggttaccctgtctgtaaaaagggaggtgagaatacctacctcacggaactgttgggaggctcagatgagatgctatatgtgaaaacattctgtaagcttcgtacaaatgtgaagtattaatattatcgcagtattattgttgttattattattgttattattaacaatcttgggtgggtagtaggagagcaaaaagtatgaatgggatggagctaagaagtctgaatacttaatgaaatggactttttggaaagaaatcagatgaaggcataaaatttagttcttagctcttgaacagaagcctaaaattcctggttctctcagggcttcgccttcaagggttctggaggagggaagggtctgcaggttccatgggtgacagcctgagatctgtcccttcaacgggctgggctgggtatgtgcctaccgatgacaatgtgtaaataaatgcgtgttcacacccacaaaaaaaa

SEQ ID NO: 72 - DNA, 1267 bp, Homo sapiens
  ref <308>: DATABASE ACCESSION NUMBER: U43374
  ref <309>: DATABASE ENTRY DATE: 2001-06-18
agcaaagatgttgaagatagaagcttggtaccagaaacaggagctgcttcgtaaagctgaagaaacaagaagagaaatgctcttacaagaggaggagaaaatgatacaacaaagacagaggctagctgctgtgaaaagagagctgaaagtaaaggaaatgcacttacaagatgctgcaagaaggcgtttttctgaagcttcagcaagatcaacaggaaatggaactaagaagactggatgatgaaattgggagaaaggtatatatgagagatcgagaaattgctgccacagccagagacctagaaatgagacagctggaactcgaatcacaaaagagactttatgagaagaatcttactgaaaatcaagaagctcttgcaaaagaaatgcgagcagatgcagatgcctatagacgaaaagtggatcttgaagaacacatgtttcataagctgatagaagcaggtgaaacccagagccagacactcagaaggtgattaaagaaaatttggcaaaggctgaacaagcatgcctaaataccgactggcagattcagtctttacataaacaaaatgtgatgatctacaacgacaatgtacaggagtagcaactctaggaaacagaggagaatggatataatgcatgtggaggaggaagccaagaagtggaaggaagctgaaggaaaagagttccgtttgagatcagcaaagaaagcttctgctctttcagatgcgtctagaaagtggtttttaaagcaagagataaatgcggctgtagaacatgctgaaaatccatgtcataaagaagaacccaggttccaaaatgaacaggactcaagctgtttgcctagaacctcacaattaaatgactcttctgaaatggatccctcaacacagatttctttaatagaagagcagtagaatgggacaccacgggacagaagcttattaagaaagtgagaaatcttcgccagagactcactgcccgggctcgtcacagatgtcaaacccctcatcttttggctgcatagaatgcatgtcaccttgagacggtcgagagagagacctattttgcaatcagtgacattgatttttagattatttatttaaaattcctataaagatcagccctttgtacagaaaaatgtgtctataaaaattatgtgttatttaattctgatactttttggcttgtaaatggcttcttgaactttttacaataaaaatgttttagaaactgttaaaaaaaaaaaaaaaaaaaaaaaaaaaaa

SEQ ID NO: 73 - DNA, 483 bp, Homo sapiens
  ref <308>: DATABASE ACCESSION NUMBER: AI472106
  ref <309>: DATABASE ENTRY DATE: 2001-06-18
ttataaagaatatgcaatccatttgggatttattgcatttaaagaaaacagattaaaacaggtatgataaatacagtaagaaaataactttaaatttcaaacaaaacagtgaatcagggacagaattcagtcaaaaagaataagcagtgtaaaggcaataaagtaataaaatcagttagtgcttaattagatatggcaggggaaaaggggtgggagggggagactgagtctatctcataattgtttcccagctatatttgaggactgaagttactttagcaagtatgttttgtaacaagtagaaatacaataaagatgtaaatttgctttatttaaaggttaaagttatttgcttagtggtacataaaaggcttcagaaaattcaagtttaacaaaaaatggaagtgtaatcaaagaaagtgcacttaaagctgtttgccagcaattaaaaagtagcttctatacagcttctattagatgact

SEQ ID NO: 74 - DNA, 2918 bp, Homo sapiens
  ref <308>: DATABASE ACCESSION NUMBER: D42043
  ref <309>: DATABASE ENTRY DATE: 2001-06-18
gggctccggcgagggacagacgcaccgatcgccggagggacagacacacgaccacgcggcgccaccgcccacgcctccacccaccggcgcccaagtcctccccgcgccgcctcctctgtatggcacaaactttcctcccgggacggaacacgctgcctcagggagcccgcgaccgcgccttctcctccgccggtcccatacgctgctgaaatgggttgcggattgaacaagttagagaaacgtgatgaaaaacggcctgggaatatttattcaactttgaagaggcctcaggtggaaaccaagatagatgtgtcctatgaataccgcttcctggagttcacgactctgagtgctgcggagctccctgggtcctcagcagtgaggctggcctccctgcgtgacctgcccgcccagctcctggagctgtaccagcagggcttctcgctggcggccctgcaccccttcgtgcagcccacccatgagcgggagaagacgcccctggagcacatctttagagccatcctgatcaagaaaaccgacagatctcagaaaactgatcttcacaatgaaggctacatcttggaattagattgctgttcctccttagaccacccgacagaccagaaactcatcccagagttcattaagaagatccaggaggctgcaagccagggcctgaaattcgttggtgttatacctcagtaccattcctctgtgaactcggcaggcagcagtgctccggtgtctactgccaacagcaccgaggatgccagagatgcaaaaaacgcacgtggggatcacgcgtcactggagaatgagaaaccggggactggggatgtgtgcagtgctccggctgggagaaaccaaagcccagagcccagctcaggccccagaggggaggtgcccctcgccaagcagcccagctcaccctccggagagggagatggtggagaactttcaccacagggggtgagcaagacactggatggaccggagagcaaccccttggaggtgcatgaagagccactctcagggaaaatggagatcttcacccttttcaacaaaccgaagagccatcagaagtgccggcaatactaccctgtcaccattcctctccatgtctccaagaatggccagacagtgagcggtttggacgccaactggttagagcacatgagcgaccacttccggaaaggaggcatgctggtgaacgcagtcttctaccttggaatagtgaatgattccttacatggcttgacagatggagtattcatctttgaagctgtttccacagaagatagcaaaaccatacagggctatgatgctattgtggttgaacaatggacagtcctggaaggtgtcgaagtgcagacagactacgtgcccctgctgaactcgctggcggcctatggctggcagctcacctgtgtgctaccaactcccgtcgtcaagactaccagcgaggggagtgtatccaccaagcagattgtctttcttcagagaccttgtctacctcagaaaatcaagaagaaggaatcgaagtttcagtggcgattctccagagaagaaatgcacaacaggcagatgaggaaatcaaaaggtaaactcagtgccagagacaaacaacaagcagaagaaaatgagaagaacttagaagaccagtcttccaaagctggagacatgggaaactgtgtttcaggacagcagcaggagggtggagtctccgaggagatgaagggccctgtccaagaggacaagggagaacagctgtcccctggtggcctgctgtgtggggtgggtgtggagggtgaggctgtgcagaatggtcctgccagccacagcagggccctggtggggatttgcactgggcactccaatcctggagaggatgccagggacggggatgctgaggaagtcagagagcttggtacggttgaagaaaactgagtcttgggcaatttgtgctaaaactaggtgagttgccaaacccaaggcatcttaccaacagctggtttgggggctggtttccctggtgttgtgtgttacctaccctttggcttggcttgacctctccttgtgagctcacctgagccctcccagggccaggttcctgacagtgttggtttttgcacatccactggaaaggtgtcattaatgacccagtgttagaatgcaagaggtcaggttattctagccctcatggctgaaggcccagtcctggctccaccactcctccagccagagggtctggaccatccagtgcctgtcctcgccacagggcctccagggagcattcgggtcaaatccatggacaccctgggctacaaaccaaggctgctgttcatcccacatcgtgtggggcagtgtccatcccctgcagctacttggtgacttaacaactccaggagccctgtcagctgccctcctccacctaaaccccttcgactcttctgctttgacaaagaaaatgacattggggaggggaggtgctccgcctcccagcttttctcaaaatagtcctatagatactggtaatctggaaatgaagaagtaattctgtctctgcacctacttttgcagaatgttcaaggaagtattctgtgttagtattaatgccaaaaagttgtttttaaaggttttgtactcagcacatcatacaaaccacattacttctgtcacttcagggcatcgggactggctggcgcccttgttatgtgctattttaatcagtgtaacattggtcaagttgttacccatgtatgctgtgtttatcatgtgtatatcgtccagaaagtattaaggctttaggtagatgcaactggcgaaccttggagagggaatgctgattgtcttgaccaaacccacagcctgtctcttctcttgtttagttacttacggcaataaatcatctatgagtt

SEQ ID NO: 75 - DNA, 2945 bp, Homo sapiens
  ref <308>: DATABASE ACCESSION NUMBER: M34181
  ref <309>: DATABASE ENTRY DATE: 2001-06-18
ccagccccccttcccttccctgaccccttcttgccatcgccccagacatggggaacgcggcgaccgccaagaaaggcagcgaggtggagagcgtgaaagagtttctagccaaagccaaagaagactttttgaaaaaatgggagaatccaactcagaataatgccggacttgaagattttgaaaggaaaaaaacccttggaacaggttcatttggaagagtcatgttggtaaaacacaaagccactgaacagtattatgccatgaagatcttagataagcagaaggttgttaaactgaagcaaatagagcatactttgaatgagaaaagaatattacaggcagtgaattttcctttccttgttcgactggagtatgcttttaaggataattctaatttatacatggttatggaatatgtccctgggggtgaaatgttttcacatctaagaagaattggaaggttcagtgagccccatgcacggttctatgcagctcagatagtgctaacattcgagtacctccattcactagacctcatctacagagatctaaaacctgaaaatctcttaattgaccatcaaggctatatccaggtcacagactttgggtttgccaaaagagttaaaggcagaacttggacattatgtggaactccagagtatttggctccagaaataattctcagcaagggctacaataaggcagtggattggtgggcattaggagtgctaatctatgaaatggcagctggctatcccccattctttgcagaccaaccaattcagatttatgaaaagattgtttctggaaaggtccgattcccatcccacttcagttcagatctcaaggaccttctacggaacctgctgcaggtggatttgaccaagagatttggaaatctaaagaatggtgtcagtgatataaaaactcacaagtggtttgccacgacagattggattgctatttaccagaggaaggttgaagctccattcataccaaagtttagaggctctggagataccagcaactttgatgactatgaagaagaagatatccgtgtctctataacagaaaaatgtgcaaaagaatttggtgaattttaaagaggaacaagatgacatctgagctcacactcagtgtttgcactctgttgagagataaggtagagctgagaccgtccttgttgaagcagttacctagttccttcattccaacgactgagtgaggtctttattgccatcatccgtgtgcgcactctgcatccacctatgtaacaaggcaccgctaagcaagcattgtctgtgccataacacagtactagaccactttcttacttctctttgggttgtctttctcctctcctacatccatttcttccttttcaatttcattggttttctctaaacagtgctccattttattttgttggtgtttcagatgggcagtgttatggctacgtgatatttgaagggaaggataagtgttgctttcagtagttattgccaatattgttgttggtcaatggcttgaagataaactttctaataattattatttctttgagtagctcagacttggttttgccaaaactcttggtaatttttgaagatagactgtcttatcaccaaggaaatttatacaaattaagactaactttcttggaattcactattctggcaataaattttggtagactaatacagtacagctagacccagaaatttggaaggctgtagatcagaggttctagttccctttccctccttttatatcctcctctccttgagtaatgaagtgaccagcctgtgtagtgtgacaaacgtgtctcattcagcaggaaaaactaatgatatggatcatcacccagattctctcacttggtaccagcatttctgtaggtattagagaagagttctaagttttctaaaccttaactgttccttaaggattttagccagtattttaatagaacatgattaatgaaagtgacaaattttaaattttctctaatagtcctcatcataaactttttaaaggaaaataagcaaactaaaaagaacattggtttagataaatacttatactttgcaaagtcaaaaatggcttgatttttggaaacaatatagaggtattcatatttaaatgagggtttacatttgttttgttttgtaaccgttaaaaagaagttgtttccagctaattattgtggtgtactatatttgtgagcctagggtaggggcactgctgcaacttctgctttcatcccatgcctcatcaatgaggaaagggaacaaagtgtataaaacctgccacaattgtattttaattttgaggtatgatattttcagatatttcataatttctaacctctgttctctcagtaaacagaatgtctgatcgatcatgcagatacaatgttggtatttgagaggttagtttttttcctacacttttttttgccaactgacttaacaacattgctgtcaggtggaaatttcaagcacttttgcacatttagttcagtgtttgttgagaatccatggcttaacccacttgttttgctatttttttctttgcttttaattttccccatctgattttatctctgcgtttcagtgacctaccttaaaacaacacacgagaagagttaaactgggttcattttaatgatcaatttacctgcatataaaatttatttttaatcaagctgatcttaatgtatataatcattctatttgctttattatcggtgcaggtaggtcattaacaccacttcttttcatctgtaccacaccctggtgaaacctttgaagacataaaaaaaacctgtctgagatgttctttctaccaatctatatgtctttcggttatcaagtgtttctgcatggtaatgtcatgtaaatgctgatattgatttcactggtccatctatatttaaaacgtgc

SEQ ID NO: 76 - DNA, 1634 bp, Homo sapiens
  ref <308>: DATABASE ACCESSION NUMBER: X06323
  ref <309>: DATABASE ENTRY DATE: 2001-06-18
ggtggcgtggggactccctgaaagcagagcggcagggcgcccggaagtcgtgagtcgagtcttcccgggctaatccatgccgggttggaggctgctgacgcaggtcggcgcccaggtgctgggtcgactcggggacggcctgggtgctgccctgggcccggggaacagaacacacatctggctttttgttagaggtcttcatggaaagagtggtacatggtgggatgagcatctttctgaagaaaatgtcccattcattaagcagttggtctctgatgaagataaagcccaattagcaagtaaactgtgtcctctgaaagatgaaccatggcctatacatccttgggaaccaggttcctttagagttggtcttattgccttgaagctgggcatgatgcctttatggaccaaggatggtcaaaagcatgtggtcacattacttcaggtacaagactgtcatgtcttaaaatatacgtcaaaggaaaactgtaatggaaaaatggcaaccctgtctgtaggaggaaaaactgtatcacgttttcgtaaagctacatccatattggaattttaccgggaacttggattgccgccgaaacagacagttaaaatctttaatataacagataatgctgcaattaaaccaggcactcctctttatgctgctcactttcgtccaggacagtatgtggatgtcacagccaaaactattggtaaaggttttcaaggtgtcatgaaaagatggggatttaaaggccagcctgctacgcatggtcaaacgaaaacccacaggagacctggagctgttgcaactggtgatattggcagagtctggcctggaactaaaatgcctggaaaaatgggaaacatatacaggacagaatatggactgaaagtgtggagaataaacacaaagcacaacataatctatgtaaatggctctgtacctggacataaaaattgcttagtaaaggtcaaagattctaaactgcctgcatataaggatctcggtaaaaatctaccattccctacatattttcctgatggagatgaagaggaactgccagaagatttgtatgatgaaaacgtgtgtcagcccggtgcgccttctattacatttgcctaacatctttggacgtggcagaaccttacatattctgtgagcttcgatgagccagagtgatatcataaccaccagaaatcatactctcctttcttagtcacaacaaaatcacacatgtcatctttgtcaagggcataaatatatcattcatacccccattaaattttgttagaaaaattaccacattaaatatatgagttaagtagattggatttgctgaaattggtgttgggcatattagcaaaatattcttaatttgtggactcgattcttttttactacatatttcccaagttatcttaagatgtctgtaaatttaacttttattaaagttttgtcaatctttgtgaaatagtggttgtggaacagtagaaaaccatatggggactatagtgcaacctatttgggtaaagaaaccatttgctaaaatggagaaagtaaatagatttttatttaaattacagaaacatgttaaaggccggacaaaggaaagacaataaaatcataaattatc

SEQ ID NO: 77 - DNA, 1080 bp, Homo sapiens
  ref <308>: DATABASE ACCESSION NUMBER: AJ006291
  ref <309>: DATABASE ENTRY DATE: 2001-06-18
ctcgcgcaagcggcgtgcggtcccgcggcgctgcagttgtgtccagccggtcacggggcggctatggcggccacgttcttcggagaggtggtgaaggcgccgtgccgagctgggactgaggacgaagaggaggaggaggaggggcggagggagacgcccgaggacagggaggtgcgtctgcagctggcgcggaagagggaagtgcggctccttcgaagacaaacaaaaacatctttggaagtttctttgctagaaaaatatccgtgctccaagtttataattgctataggaaataatgcagtagcatttctgtcatcatttgttatgaattcaggagtctgggaggaagttggttgtgccaaactctggaatgaatggtgtagaacaacagacactacacatctgtcctccacagaggctttttgtgtgttttatcatctaaaatccaatccctcggtttttctctgtcagtgcagttgctatgttgcagaagatcaacagtatcagtggctggaaaaggtttttggctcttgtccaaggaagaacatgcagataactattctcacatgtcgacatgttaccgattataaaacctcagaatccaccggcagccttccttctcctttcctgagagccctaaaaacacagaatttcaaagactcggcgtgttgtccattgctagaacaaccgaatatagtacacgaccttcctgcagcagttctaagctactgtcaagtatggaaaatcccagcaattctgtacttgtgttatactgatgtgatgaaattagacctaatcacagtggaagcttttaagcctatactttctaccagaagcttgaagggtttggttaagaatattccccaaagcactgagatactaaagaaattgatgacaacaaatgagattcagagtaacatttatacatgatcttaaacattgttttgtagtgtatattacttgtccattcctttaaggggagcagcctgcactcttttgtagattacttttgggggatatattttgagaatgatgaaacggaataaaattgtaaaaaactaaaaaaaaaaaaaaaaaaaa

SEQ ID NO: 78 - DNA, 3080 bp, Homo sapiens
  ref <308>: DATABASE ACCESSION NUMBER: U03911
  ref <309>: DATABASE ENTRY DATE: 2001-06-18
gacatggcggtgcagccgaaggagacgctgcagttggagagcgcggccgaggtcggcttcgtgcgcttctttcagggcatgccggagaagccgaccaccacagtgcgccttttcgaccggggcgacttctatacggcgcacggcgaggacgcgctgctggccgcccgggaggtgttcaagacccagggggtgatcaagtacatggggccggcaggagcaaagaatctgcagagtgttgtgcttagtaaaatgaattttgaatcttttgtaaaagatcttcttctggttcgtcagtatagagttgaagtttataagaatagagctggaaataaggcatccaaggagaatgattggtatttggcatataaggcttctcctggcaatctctctcagtttgaagatattctctttggtaacaatgatatgtcagcttccattggtgttgtgggtgttaaaatgtccgcagttgatggccagagacaggttggagttgggtatgtggattccatacagaggaaactaggactgtgtgaattccctgataatgatcagttctccaatcttgaggctctcctcatccagattggaccaaaggaatgtgttttacccggaggagagactgctggagacatggggaaactgagacagataattcaaagaggaggaattctgatcacagaaagaaaaaaagctgacttttccacaaaagacatttatcaggacctcaaccggttgttgaaaggcaaaaagggagagcagatgaatagtgctgtattgccagaaatggagaatcaggttgcagtttcatcactgtctgcggtaatcaagtttttagaactcttatcagatgattccaactttggacagtttgaactgactacttttgacttcagccagtatatgaaattggatattgcagcagtcagagcccttaacctttttcagggttctgttgaagataccactggctctcagtctctggctgccttgctgaataagtgtaaaacccctcaaggacaaagacttgttaaccagtggattaagcagcctctcatggataagaacagaatagaggagagattgaatttagtggaagcttttgtagaagatgcagaattgaggcagactttacaagaagatttacttcgtcgattcccagatcttaaccgacttgccaagaagtttcaaagacaagcagcaaacttacaagattgttaccgactctatcagggtataaatcaactacctaatgttatacaggctctggaaaaacatgaaggaaaacaccagaaattattgttggcagtttttgtgactcctcttactgatcttcgttctgacttctccaagtttcaggaaatgatagaaacaactttagatatggatcaggtggaaaaccatgaattccttgtaaaaccttcatttgatcctaatctcagtgaattaagagaaataatgaatgacttggaaaagaagatgcagtcaacattaataagtgcagccagagatcttggcttggaccctggcaaacagattaaactggattccagtgcacagtttggatattactttcgtgtaacctgtaaggaagaaaaagtccttcgtaacaataaaaactttagtactgtagatatccagaagaatggtgttaaatttaccaacagcaaattgacttctttaaatgaagagtataccaaaaataaaacagaatatgaagaagcccaggatgccattgttaaagaaattgtcaatatttcttcaggctatgtagaaccaatgcagacactcaatgatgtgttagctcagctagatgctgttgtcagctttgctcacgtgtcaaatggagcacctgttccatatgtacgaccagccattttggagaaaggacaaggaagaattatattaaaagcatccaggcatgcttgtgttgaagttcaagatgaaattgcatttattcctaatgacgtatactttgaaaaagataaacagatgttccacatcattactggccccaatatgggaggtaaatcaacatatattcgacaaactggggtgatagtactcatggcccaaattgggtgttttgtgccatgtgagtcagcagaagtgtccattgtggactgcatcttagcccgagtaggggctggtgacagtcaattgaaaggagtctccacgttcatggctgaaatgttggaaactgcttctatcctcaggtctgcaaccaaagattcattaataatcatagatgaattgggaagaggaacttctacctacgatggatttgggttagcatgggctatatcagaatacattgcaacaaagattggtgctttttgcatgtttgcaacccattttcatgaacttactgccttggccaatcagataccaactgttaataatctacatgtcacagcactcaccactgaagagaccttaactatgctttatcaggtgaagaaaggtgtctgtgatcaaagttttgggattcatgttgcagagcttgctaatttccctaagcatgtaatagagtgtgctaaacagaaagccctggaacttgaggagtttcagtatattggagaatcgcaaggatatgatatcatggaaccagcagcaaagaagtgctatctggaaagagagcaaggtgaaaaaattattcaggagttcctgtccaaggtgaaacaaatgccctttactgaaatgtcagaagaaaacatcacaataaagttaaaacagctaaaagctgaagtaatagcaaagaataatagctttgtaaatgaaatcatttcacgaataaaagttactacgtgaaaaatcccagtaatggaatgaaggtaatattgataagctattgtctgtaatagttttatattgttttatattaaccctttttccatagtgttaactgtcagtgcccatgggctatcaacttaataagatatttagtaatattttactttgaggacattttcaaagatttttattttgaaaaatgagagctgtaactgaggactgtttgcaattgacataggcaataataagtgatgtgctgaattttataaataaaatcatgtagtttgtgg

SEQ ID NO: 79 - DNA, 503 bp, Homo sapiens
  ref <308>: DATABASE ACCESSION NUMBER: AI374994
  ref <309>: DATABASE ENTRY DATE: 2001-06-18
gcggccgcgctgggcgtgaggggggccttagagggcctccccaggccgcctccgcccgtgaaggtagttgtcctgggaacccctgcagaagaagatggtggtggcaaaattgatttaattgaagcaggggcttttacaaatcttgatgttgtttttatggcccacccatcacaagagaatgctgcttatctaccagatatggctgaacatgatgtgactgtgaaatactatggaaaagcatctcattctgcttcttatccctgggaaggattaaatgcattagatgctgctgtgctggcctataacaatctgtctgtgttcagacagcaaatgaaaccaacctggagagttcatggtataataaaaaatggtggtgtaaaacccaatatcattccctcttattctgaattaatctattacttccgtgcaccctcaatgaaagaacttcaagttttgaccaaaaaggcagaagattgcttcagagctgcagctttggcttcagg

SEQ ID NO: 80 - DNA, 1408 bp, Homo sapiens
  ref <308>: DATABASE ACCESSION NUMBER: D84276
  ref <309>: DATABASE ENTRY DATE: 2001-06-18
aaacagaaggggaggtgcagtttcagaacccagccagcctctctcttgctgcctagcctcctgccggcctcatcttcgcccagccaaccccgcctggagccctatggccaactgcgagttcagcccggtgtccggggacaaaccctgctgccggctctctaggagagcccaactctgtcttggcgtcagtatcctggtcctgatcctcgtcgtggtgctcgcggtggtcgtcccgaggtggcgccagcagtggagcggtccgggcaccaccaagcgctttcccgagaccgtcctggcgcgatgcgtcaagtacactgaaattcatcctgagatgagacatgtagactgccaaagtgtatgggatgctttcaagggtgcatttatttcaaaacatccttgcaacattactgaagaagactatcagccactaatgaagttgggaactcagaccgtaccttgcaacaagattcttctttggagcagaataaaagatctggcccatcagttcacacaggtccagcgggacatgttcaccctggaggacacgctgctaggctaccttgctgatgacctcacatggtgtggtgaattcaacacttccaaaataaactatcaatcttgcccagactggagaaaggactgcagcaacaaccctgtttcagtattctggaaaacggtttcccgcaggtttgcagaagctgcctgtgatgtggtccatgtgatgctcaatggatcccgcagtaaaatctttgacaaaaacagcacttttgggagtgtggaagtccataatttgcaaccagagaaggttcagacactagaggcctgggtgatacatggtggaagagaagattccagagacttatgccaggatcccaccataaaagagctggaatcgattataagcaaaaggaatattcaattttcctgcaagaatatctacagacctgacaagtttcttcagtgtgtgaaaaatcctgaggattcatcttgcacatctgagatctgagccagtcgctgtggttgttttagctccttgactccttgtggtttatgtcatcatacatgactcagcatacctgctggtgcagagctgaagattttggagggtcctccacaataaggtcaatgccagagacggaagcctttttccccaaagtcttaaaataacttatatcatcagcatacctttattgtgatctatcaatagtcaagaaaaattattgtataagattagaatgaaaattgtatgttaagttacttcactttaattctcatgtgatccttttatgttatttatatattggtaacatcctttctattgaaaaatcaccacaccaaacctctcttattagaacaggcaagtgaagaaaagtgaatgctcaagtttttcagaaagcattacatttcc

SEQ ID NO: 81 - DNA, 2797 bp, Homo sapiens
  ref <308>: DATABASE ACCESSION NUMBER: X70683
  ref <309>: DATABASE ENTRY DATE: 2001-06-18
ttccccagcattcgagaaactcctctctactttagcacggtctccagactcagccgagagacagcaaactgcagcgcggtgagagagcgagagagagggagagagagactctccagcctgggaactataactcctctgcgagaggcggagaactccttccccaaatcttttggggacttttctctctttacccacctccgcccctgcgaggagttgaggggccagttcggccgccgcgcgcgtcttcccgttcggcgtgtgcttggcccggggaaccgggagggcccggcgatcgcgcggcggccgccgcgagggtgtgagcgcgcgtgggcgcccgccgagccgaggccatggtgcagcaaaccaacaatgccgagaacacggaagcgctgctggccggcgagagctcggactcgggcgccggcctcgagctgggaatcgcctcctcccccacgcccggctccaccgcctccacgggcggcaaggccgacgacccgagctggtgcaagaccccgagtgggcacatcaagcgacccatgaacgccttcatggtgtggtcgcagatcgagcggcgcaagatcatggagcagtcgcccgacatgcacaacgccgagatctccaagcggctgggcaaacgctggaagctgctcaaagacagcgacaagatccctttcattcgagaggcggagcggctgcgcctcaagcacatggctgactaccccgactacaagtaccggcccaggaagaaggtgaagtccggcaacgccaactccagctcctcggccgccgcctcctccaagccgggggagaagggagacaaggtcggtggcagtggcgggggcggccatgggggcggcggcggcggcgggagcagcaacgcggggggaggaggcggcggtgcgagtggcggcggcgccaactccaaaccggcgcagaaaaagagctgcggctccaaagtggcgggcggcgcgggcggtggggttagcaaaccgcacgccaagctcatcctggcaggcggcggcggcggcgggaaagcagcggctgccgccgccgcctccttcgccgccgaacaggcgggggccgccgccctgctgcccctgggcgccgccgccgaccaccactcgctgtacaaggcgcggactcccagcgcctcggcctccgcctcctcggcagcctcggcctccgcagcgctcgcggccccgggcaagcacctggcggagaagaaggtgaagcgcgtctacctgttcggcggcctgggcacgtcgtcgtcgcccgtgggcggcgtgggcgcgggagccgaccccagcgaccccctgggcctgtacgaggaggagggcgcgggctgctcgcccgacgcgcccagcctgagcggccgcagcagcgccgcctcgtcccccgccgccggccgctcgcccgccgaccaccgcggctacgccagcctgcgcgccgcctcgcccgccccgtccagcgcgccctcgcacgcgtcctcctcggcctcgtcccactcctcctcttcctcctcctcgggctcctcgtcctccgacgacgagttcgaagacgacctgctcgacctgaaccccagctcaaactttgagagcatgtccctgggcagcttcagttcgtcgtcggcgctcgaccgggacctggattttaacttcgagcccggctccggctcgcacttcgagttcccggactactgcacgcccgaggtgagcgagatgatctcgggagactggctcgagtccagcatctccaacctggttttcacctactgaagggcgcgcaggcagggagaagggccggggggggtaggagaggagaaaaaaaaagtgaaaaaaagaaacgaaaaggacagacgaagagtttaaagagaaaagggaaaaaagaaagaaaaagtaagcagggctcgttcgcccgcgttctcgtcgtcggatcaaggagcgcggcggcgttttggacccgcgctcccatcccccaccttcccgggccggggacccactctgcccagccggagggacgcggaggaggaagagggtagacaggggcgacctgtgattgttgttattgatgttgttgttgatggcaaaaaaaaaaagcgacttcgagtttgctcccctttgcttgaagagaccccctcccccttccaacgagcttccggacttgtctgcacccccagcaagaaggcgagttagttttctagagacttgaaggagtctcccccttcctgcatcaccaccttggttttgttttattttgcttcttggtcaagaaaggaggggagaacccagcgcacccctccccccctttttttaaacgcgtgatgaagacagaaggctccggggtgacgaatttggccgatggcagatgttttgggggaacgccgggactgagagactccacgcaggcgaattcccgtttggggcctttttttcctccctcttttccccttgccccctctgcagccggaggaggagatgttgaggggaggaggccagccagtgtgaccggcgctaggaaatgacccgagaaccccgttggaagcgcagcagcgggagctaggggcgggggcggaggaggacacgaactggaagggggttcacggtcaaactgaaatggatttgcacgttggggagctggcggcggcggctgctgggcctccgccttcttttctacgtgaaatcagtgaggtgagacttcccagaccccggaggcgtggaggagaggagactgtttgatgtggtacaggggcagtcagtggagggcgagtggtttcggaaaaaaaaaaagaaaaaaaggg

SEQ ID NO: 82 - DNA, 4824 bp, Homo sapiens
  ref <308>: DATABASE ACCESSION NUMBER: AB014540
  ref <309>: DATABASE ENTRY DATE: 2001-06-18
ggcgcggaggggctggctgggcaggaggggttggcggggcagcagggccgcggccatggggagcttgaaggaggagctgctcaaagccatctggcacgccttcaccgcactcgaccaggaccacagcggcaaggtctccaagtcccagctcaaggtcctttcccataacctgtgcacggtgctgaaggttcctcatgacccagttgcccttgaagagcacttcagggatgatgatgagggtccagtgtccaaccagggctacatgccttatttaaacaggttcattttggaaaaggtccaagacaactttgacaagattgaattcaataggatgtgttggaccctctgtgtcaaaaaaaacctcacaaagaatcccctgctcattacagaagaagatgcatttaaaatatgggttattttcaactttttatctgaggacaagtatccattaattattgtgtcagaagagattgaatacctgcttaagaagcttacagaagctatgggaggaggttggcagcaagaacaatttgaacattataaaatcaactttgatgacagtaaaaatggcctttctgcatgggaacttattgagcttattggaaatggacagtttagcaaaggcatggaccggcagactgtgtctatggcaattaatgaagtctttaatgaacttatattagatgtgttaaagcagggttacatgatgaaaaagggccacagacggaaaaactggactgaacgatggtttgtactaaaacccaacataatttcttactatgtgagtgaggatctgaaggataagaaaggagacattctcttggatgaaaattgctgtgtagagtccttgcctgacaaagatggaaagaaatgcctttttctcgtaaaatgttttgataagacttttgaaatcagtgcttcagataagaagaagaaacaggagtggattcaagccattcattctactattcatctgttgaagctgggcagccctccaccacacaaagaagcccgccagcgtcggaaagaactccggaagaagcagctggctgaacaagaggaactggagcgacaaatgaaggaactccaggccgccaatgaaagcaagcagcaggagctggaggccgtgcggaagaaactggaggaagcagcatctcgtgcagcagaagaggaaaagaaacgccttcagactcaagtggaacttcaggccaggttcagcacagagctggaaagagagaagcttatcagacagcagatggaagaacaggttgctcaaaagtcctctgaactggaacagtatttacagcgagtacgggagctggaagacatgtacctaaagctgcaggaggctcttgaagatgagagacaggcccggcaagatgaagagacagtgcggaagcttcaggccaggttgttggaggaagagtcttccaagagggctgaactagaaaagtggcacttggagcagcagcaggccattcagacaaccgaggcggagaagcaggagttggagaatcagcgtgtcctgaaggaacaggccctgcaggaggccatggagcagctggaggagcttgagttagaacggaagcaagcacttgagcagtacgaggaagttaaaaagaagctggagatggcaactaataagaccaagagctggaaggacaaagtggcccatcatgaaggattaattcgactgatagaaccaggttcaaagaaccctcacctgatcactaactggggacctgcagctttcactgaggcagaacttgaagagagagagaagaactggaaagagaaaaagaccacggagtgactgagcttgctggcagtcacgtcagttatgtagatactgcatggcaggagagctttacgctaaagacaaaagaaacagctttgggggccgggcgtggtggctcacgcctgtaatcccagcactttgggaggccgaggcgggtggatcacctgaggtcaggagttcaagaccagcctggccaacctggtgaaaccctgtctctactaaaaatacaaaaaaaattagctgagcgtggtggcgggcgcctgtaatcccagctacttgggaggctgaggcaggagaatcacttgaacgtgggaggcggaggttgcagcgagctgagatcatgccgttgtactccagcttgggcaacagagtgagactccatctcaaaacaaaacaaaacaaaacaaaacaaaaaaacccggctttgctgcttttaactcttcttccttctgtgcctctctaagtgggtcagtatcctaaggaagccttcttatttatcttcctgcaaacaagggttacctgaaaagaaaaaaaaagtcaacattgtcaagctgtttgtttactctttctttgaaaacatcaccttctgaaatttgtcttttagctctctcagattcttccccaaatgaggcagggtgcagacagcacagtcagctctgcagagtttggaggggctcactgccactgggtactcagaacctctgtggactggatgtcagctctttcctttggcagcgtgtttccttttccgagtatgtgctgttaaactagattggccggttcgctttccatttcctgacacttgacatggaatgcctttgaccattggtgctctgacagagaagtcatggagtcattgccatttcctggttgcccttttggaatgtgatcctgttagtagaggttttctagcttctactaagatatttctttccctaaccatcatacacttggcatgtttcattcccatctcctttcccctcaccttaaaggagactacccctttgccccatattgtcaacctaattttctctcgtactctctctagtgaatgatgtgctaccaagtatatgccaggctgtgagaggattatactgagtagtagaaagaagctaatttgaaataaaaattatttgtataattaagaaagcagattagatgcacatggtcaacaggaagttgactgtatgtctgctagttagattcaaaacatcataaagatgatagcatgtcaatatattagcctagccattatgttagcctttgttaggtgggcagcttttctgctttttcccttcctctgtggtgacaacggaggaaatatccaacagaaatacgtctaacagggaaattgggatcatagtttatatgcatctgatttgaaaggagtattgaggaaggttttcatatatgatctatctttggattaaaaagaacatttatgaaatcaagccttctaacactagttataattgagaagcaacagtaactccgtggacagcaatcaagcttaaaattgtaaataaatatggggataattcagttgttgcaaaaaaagggcagaattcagtagaataaagtccttttctcttacaggtattaaatgaggacagagaacctcaggtgttcttatgctagtgcttgctgagtgcatactaagaaagcaattccaaatagatgtatacatctagagagagtggtattagagattcagtgtatgtatttatttacatgagaggaaactggaatataatcccataaattattggaatataatcccataaattatcaccttttatgactggaaaatatttgccaatgaagaaatggtctgtaggtatttgtcttaagatttttggctgtttaataaaaatgtaactttaacggtttcttatagttgcctttataaagtgtattgtctaaaatatttttgtatcatgtgcctttgaaatttgacagctgatttgggtgttggatttctgcccagccatttatcagtattatcattttattcagtagctggcaggtgtattagacaaacgagacttaggtaaggaatggaacctttcctgtggtttgactgcacatcacaccagaagactccagtatccctcattccagaatgaggaaaaagtattctacaaagaacctaatcacctctgtgaaatctatgggatggaaacagtgtggccttaggagtcaaatagtctctgcatggtggggaggatcatgatggaatatgtgaatttctacttctagaagttgtgaaataggtcctgcacttttgcagaatgtccttctttaaacctggcttattccacagctgtagctgataacatgacctggggcttagctgctctagccctgggttcttggagacctcacactgcctggcccctggccatccacctaaggactgcctgctttctggtcacatgtggaccttgatacgactaagcggttacatatgtggttgtgcaaaagctttctgtttaatgcatagtgttaccgatttacatcttggttttcagtggcactatgtctaggaggcaatatccttttaaacagtgctttggctaagatagatacttgtgaatcaaagatagcacagaaatgaactaagtatatcccatttggaattatattttgatactatttaaaatggtttcacctgttaaagggccaacagaactcttggttttacttttgtaattactgtacagaaaatttcaagagtgtttgagtgcttgtcatcaggtgttttccttaataagtagggatatgatcatttacaggaattatatatgaaaaaagtttttgaaatgtatttttgtgatgtgctatgttgaggggaaaccaaatatttatgattttaaaacattcgtatgaaaacattgtacaatgtaatatgctcaactttctcaattttttgctaatttttctaagatacattaaaaatgttttatatttttttttaagtaaaatggacccagtaagaaaattaaaaataccagaacatacacttt

SEQ ID NO: 83 - DNA, 6823 bp, Homo sapiens
  ref <308>: DATABASE ACCESSION NUMBER: AB002330
  ref <309>: DATABASE ENTRY DATE: 2001-06-18
ggcggacaaaacgccaggcggatctcagaaggccagttcaaagacgagatcatcagatgttcattcatctggatcttcagatgcacatatggatgcatctggaccctcagatagtgatatgccaagtcggacacgacctaagagcccaagaaaacataattataggaatgaaagtgcccgtgaaagcctttgtgattctcctcatcagaatctctcaagacctcttctggaaaacaaacttaaagcattcagtattggaaaaatgagtacagctaagcgaactttaagtaaaaaggaacaggaagaattaaagaaaaaggaggatgaaaaggcagctgctgagatttatgaggagtttcttgctgcttttgaaggaagtgatggtaataaagtgaaaacatttgtgcgagggggtgttgttaatgcagctaaagaagaacatgaaacagatgaaaaaagaggtaaaatctataagccatcttcaagatttgcagatcaaaaaaatcctccaaatcagtcttccaatgaaagaccaccatctcttcttgtgatagaaaccaaaaaacctccacttaaaaaaggagagaaagaaaagaaaaaaagcaatttggaactcttcaaagaagaattaaagcaaattcaagaggaacgtgatgagagacataaaacaaaaggcagattaagtcgatttgaacctcctcagtcagattctgatggtcagcgtcgttctatggacgcgccttcaagaagaaatagatcatctggtgttcttgatgattacgcacctggctcacatgatgtaggagatccaagcactactaatttataccttggaaacattaatccacagatgaatgaagaaatgctgtgccaagaatttggaagatttggaccgttagccagtgtgaaaatcatgtggcctagaactgatgaagaaagagccagagagagaaattgcggctttgtggcctttatgaatagaagagatgctgaaagagctttaaaaaatttgaatggaaaaatgattatgtcttttgaaatgaagttaggttggggtaaagctgtacctattcctccacatccaatatacattccgccttctatgatggaacatacgcttcccccacctccatccggactgccttttaatgcgcagcctagagagcggttaaaaaaccctaatgctcctatgttaccgccacctaaaaacaaagaggattttgagaagactctgtcgcaagccatagtcaaagtggttatcccaacagaaaggaatttgctcgccctgatacatcgaatgatagagtttgttgtacgtgaagggccaatgtttgaagctatgattatgaacagagaaatcaacaatcctatgttcaggttcttatttgaaaaccagacaccagcccatgtttactataggtggaagctttattctattctgcagggagattctccaactaaatggcggacggaagattttcgtatgttcaaaaatggatctttttggaggccaccaccattaaatccgtacttgcatggaatgtcagaagagcaagaaacagaagcttttgtagaggaacctagtaaaaagggagcacttaaggaagaacagagggataaattggaagaaatcttgcggggattaactccaaggaaaaatgatattggagatgcaatggttttctgtcttaataatgctgaagctgctgaagaaatagtggattgcattactgagtcgttgtccatcttaaagacaccccttcctaaaaagattgccagattatatttggtttctgatgttttgtacaactcttcagccaaagttgctaatgcttcatattatagaaaattttttgaaacaaagttatgtcagatattttcagacctcaatgccacctatcgtacaattcaaggccatttacaatctgaaaactttaagcaacgggtaatgacttgcttcagagcatgggaagattgggcaatttatccagaaccatttttgatcaaactacaaaatattttcttaggacttgtaaatattattgaagaaaaggaaacagaggatgttccagatgaccttgatggtgcccccatcgaggaagagcttgatggtgcacctctggaagatgtagatggaattcctattgatgctactcccatcgatgatcttgatggagtccctataaaaagtcttgatgatgatcttgatggagtgcctttggatgcaactgaagactcaaaaaagaatgagcctatatttaaagttgccccatcaaaatgggaagctgtggatgaatctgaattggaagcacaggctgttacaacttctaaatgggaattatttgaccagcatgaagaatcagaagaagaagaaaatcaaaatcaagaagaagaaagtgaagatgaagaagatactcaaagttccaaatctgaagaacatcatttgtactctaatccaatcaaagaagaaatgactgagtctaagttctctaagtactctgaaatgagtgaggaaaaacgagccaaacttcgtgaaattgagctcaaagttatgaagtttcaggatgaattggaatctgggaaaagacctaaaaaaccaggccagagttttcaggagcaagtagaacactacagagataaacttcttcaacgagagaaagagaaagagttagaaagagaacgagaaagagacaagaaagataaagaaaaattggaatctcgctccaaagacaagaaggaaaaagatgagtgtactccgacaaggaaggaaaggaagaggcgacacagtacatcccccagcccatctcgcagtagcagtggtagacgagtgaaatccccatcaccaaaatcggagcgatcagagcgttcagaaagatctcataaagagagctcacggtccaggtcatctcacaaagattctcctagagatgttagcaaaaaagccaaaagatcaccatctggttcaaggacacctaaaaggtctaggcgatcacggtctagatctcctaaaaaatcaggaaagaagtccagatcccagtccagatctccacacaggtctcataaaaagtcaaagaaaaacaaacactgacgtaaatttttaagatgctgtcacttattggaaatgcgatttgttttgtgcctgaacggtctgttttttaaaaaaacaaaaaatcaaatgaaagagcattcctggggttttttgtttgtttgtgtatgcatgtgtaaactcatgagcaactgcatctgtagatctgtcattgttttatattgtgtaaattactttcattgtggctatttctcaagatgaaatttttattgttctaatggatttcatcagaaatgtgtataatggatctgctgacagtagtagtattttgttttaggatgttgtgacttagcaaaaataatacagatgtcttccccccttttgtagctttgacaatttgaattagatttcaaataaaatctgaacagaaaactataatgttgtttttttgccccaccggtgatattaagtcccttaaagtcctactgagtttcacactactgttgtgcttcttatacctgatgcactttataagccccagtgttcaagtagcttaagttttatatttactaagatgactatccaaattaagggacctgagactcctatttggtggtttgctaaccatttgcttttgataagtttctcttgggtaatactaatacccagatatcaaagactaggtagatatggcatggcgttttgttagtggaatgcctggctaaaacatttttttcacagaagcaatatgatttccatacatccaacccatgttctgagcaactacttacttttagggggaaattaaatatcttttcatttcctcttctattatgaaagaagtttatttgtaaaacaaattttctaacaaggtttggccatagaattctcttgtatgattgttgaccttttataatcttctgtaggctatctttcaaacactggcatcagaatattttttataagtttgtgtttaaacagcttagttggtccccccccccactcccaagagacttgggtttagttatagctttaagtaaaatttaaaaataaaatgtttttcaggaaacttcgtatctaatggtttgtaaattcaaggtgcaaaaagttgatttaaaccatttgcagagttgaactctattatgaaaataaatttgctacggtatgaggaagaaataaaacttgtgtaatgttggtcataatactgctataaatataataaagggttatgtagaattgaactgacactattatttgtgaatcttgatttcagttttttatgtaggcacttcatacactggtttgatgggttttttttttcctccctaaaagagaaagtagaaaactattctaacaatggattattttgatttagcttgctttttaaaaaaatcttttcaacttgttttacttaatcttgcctagtcacaaaataagatgtgcacccatggtttggagagttcctatattagctgagcagtgagatacactatttccaaacggtgcacacctacagtagctttggaaatgagccaatcactgttttacttaatggttcttatcagcatgcaaatattgcttgaaagttatttccttattcactgttttgttagtccattttgttaggaaacattaattcctaaaaatttgttcagaataattaaaagtgaacatttggtgctgatactcaaaaacctacaaatgtagccatttaaaaagtaacatgtttttctcccctgctcattgcctgggagaatggaattttatataactacctttctttgcaaaaataacggtcgtgtcgagttggtggtgattttggcattccatcttgcactggtttctagtataggcttagaaataattggtcaggtaataatctttccagtcaagttgcaagggatgcttatttctcttcaaaaaaagacatcctgcgggattgagtagaaaattttaggtcagttttgggtgcttatttgtaatatttttcctactacattggagtttagcagttctttttttctggatccagatacaagtgtcatggtttatcttacagtgggtgaaactgactttcttttggttgggtgggtgaggatttcttaggcctgatagaatatatattctgtgaagtttgttaatgtacatattagattgtattggatttttttttcttgaattgcaaatggtattattagataggttatttccagttttacttcatgacaaattacctagagtaaacctacttaatactccaatggattctatgaaagtttaatgggatcagaaattggtgacttataagggggaagatattctaccatatttttataatagcttattattcatgtttcttgtctgaaggacactcaagttacagagcaaaatttctataggttgactagaatgttcataagcatggtcttccagttgcaggaaagatcatgttctatctgtggacacttactgtcctctaccacagctacgtgccagagttgttttccacagttcttataaagggcatgacttaggctctttaccctccaacttaatgtttatacacagggattgtttactaggttaatgacatttaactcccctctcttctgtaggtgagagaaaataagtaagtcttgatctgtttcttaccaaagagagacagacctatgatggaaaatgatcacgtctctgaattttttctttaacgttatagttccttattacagatagtaagcatatgggaatttctgagctataacatgttgagaagttagaaattaaaactaacacaacaaaaggcgctgaatcaaaagatctttgcttttatttggctcagaatgtttttggcttttctgctaaagatggcagaaattactctacacagacctgatttttctttattgcagaccattcttgtgggcttaccctgagacttttatcccaattagtgaatcttggagggaatacttgcttatttatgacttaggtatttccccccaaactttaatattcttgagcacttgaaaatacttttgagaaattttaactgtgattaaatttaggtttattagaaatattctgtacacatttgcctccatggtggtgtaagttctgaaaaattatatgaccgtgacaatagtttatcatcatcattattgttattcaaaataagggtaaataaatctctgtattgccaaagtgacttaaactgttctgatgaccacacagtgtgatttctttagcagagaaagttggttttaaaaataaatagtaccacttttctaagactgtacagtttacaaataaggtttttttctttgttgttttcctcttctattaagttttagtgaaaagcctaattacagaaaattgtgcagatactagtgaagatactagtataagtttaaaggaacatgtgactgtaaaatctcacatttacaaagtgcttgatctcttcatatttcacacgcatgttttagaatagattttagggagtgtttaattcattatccttttgacttaaaatttttgttaccaacttcctaggacttagataatatataaataagtacaaatcccaggggaagtgttgtgatgctagactaaaaggtgggaatgtgctgctgttccgtgagccttgttccattgttgaaaatttgatgcctcagtgtttattcagtaccacctcatggagcttcaatgtaaatggattatatgtataattggtaatttgtatagttttgtagattgtagattaaatgcactcatcatgtc

SEQ ID NO: 84 - DNA, 1769 bp, Homo sapiens
  ref <308>: DATABASE ACCESSION NUMBER: U32519
  ref <309>: DATABASE ENTRY DATE: 2001-06-18
gaattcgggcggggtttgtactatcctcggtgctgtggtgcagagctagttcctctccagctcagccgcgtaggtttggacatatttactcttttccccccaggttgaattgaccaaagcaatggtgatggagaagcctagtcccctgctggtcgggcgggaatttgtgagacagtattacacactgctgaaccaggccccagacatgctgcatagattttatggaaagaactcttcttatgtccatgggggattggattcaaatggaaagccagcagatgcagtctacggacagaaagaaatccacaggaaagtgatgtcacaaaacttcaccaactgccacaccaagattcgccatgttgatgctcatgccacgctaaatgatggtgtggtagtccaggtgatggggcttctctctaacaacaaccaggctttgaggagattcatgcaaacgtttgtccttgctcctgaggggtctgttgcaaataaattctatgttcacaatgatatcttcagataccaagatgaggtctttggtgggtttgtcactgagcctcaggaggagtctgaagaagaagtagaggaacctgaagaaagacagcaaacacctgaggtggtacctgatgattctggaactttctatgatcaggcagttgtcagtaatgacatggaagaacatttagaggagcctgttgctgaaccagagcctgatcctgaaccagaaccagaacaagaacctgtatctgaaatccaagaggaaaagcctgagccagtattagaagaaactgcccctgaggatgctcagaagagttcttctccagcacctgcagacatagctcagacagtacaggaagacttgaggacattttcttgggcatctgtgaccagtaagaatcttccacccagtggagctgttccagttactgggataccacctcatgttgttaaagtaccagcttcacagccccgtccagagtctaagcctgaatctcagattccaccacaaagacctcagcgggatcaaagagtgcgagaacaacgaataaatattcctccccaaaggggacccagaccaatccgtgaggctggtgagcaaggtgacattgaaccccgaagaatggtgagacaccctgacagtcaccaactcttcattggcaacctgcctcatgaagtggacaaatcagagcttaaagatttctttcaaagttatggaaacgtggtggagttgcgcattaacagtggtgggaaattacccaattttggttttgttgtgtttgatgattctgagcctgttcagaaagtccttagcaacaggcccatcatgttcagaggtgaggtccgtctgaatgtcgaagagaagaagactcgagctgccagggaaggcgaccgacgagataatcgccttcggggacctggaggccctcgaggtgggctgggtggtggaatgagaggccctccccgtggaggcatggtgcagaaaccaggatttggagtgggaagggggcttgcgccacggcagtaatcttcatggatcttcatgcagccatacaaaccctggttccaacagaatggtgaattttcgacagcctttggtatcttggagtatgaccccagtctgttataaactgcttaagtttgtataattttactttttttgtgtgttaatggtgtgtgctccctctccctctcttccctttcctgacctttagtctttcacttccaattttgtggaatgatattttaggaataacggacttttacccgaattc

SEQ ID NO: 85 - DNA, 3614 bp, Homo sapiens
  ref <308>: DATABASE ACCESSION NUMBER: D86956
  ref <309>: DATABASE ENTRY DATE: 2001-06-18
ctgaggaagtgggacctccccttttgggtcggtagttcagcgccggcgccggtgtgcgagccgcggcagagtgaggcaggcaacccgaggtgcggagcgacctgcggaggctgagccccgctttctcccagggtttcttatcagccagccgccgctgtccccgggggagtaggaggctcctgacaggccgcggctgtctgtgtgtccttctgagtgtcagaggaacggccagaccccgcgggccggagcagaacgcggccagggcagaaagcggcggcaggagaagcaggcagggggccggaggacgcagaccgagacccgaggcggaggcggaccgcgagccggccatgtcggtggtggggttggacgtgggctcgcagagctgctacatcgcggtagcccgggccgggggcatcgagaccatcgccaatgagttcagcgaccggtgcaccccgtcagtcatatcatttggatcaaaaaatagaacaatcggagttgcagccaaaaatcagcaaatcactcatgcaaacaatacggtgtctaacttcaaaagatttcatggccgagcattcaatgaccccttcattcaaaaggagaaggaaaacttgagttacgatttggttccattgaaaaatggtggagttggaataaaggtaatgtacatgggtgaagaacatctatttagtgtggagcagataacagccatgttgttgactaagctgaaggaaactgctgaaaacagcctcaagaaaccagtaacagattgtgttatttcagtcccctccttctttacagatgctgagaggcgatctgtgttagatgctgcacagattgttggcctaaactgtttaagacttatgaatgacatgacagctgttgctttgaattacggaatttataagcaggatctcccaagcctggatgagaaacctcggatagtggtttttgttgatatgggacattcagcttttcaagtgtctgcttgtgcttttaacaagggaaaattgaaggtactgggaacagcttttgatcctttcttaggaggaaaaaacttcgatgaaaagttagtggaacatttttgtgcagaatttaaaactaagtacaagttggatgcaaaatccaaaatacgagcactcctacgtctgtatcaggaatgtgaaaaactgaaaaagctaatgagctctaacagcacagaccttccactgaatatcgaatgctttatgaatgataaagatgtttccggaaagatgaacaggtcacaatttgaagaactctgtgctgaacttctgcaaaagatagaagtacccctttattcactgttggaacaaactcatctcaaagtagaagatgtgagtgcagttgagattgttggaggcgctacacgaattccagctgtgaaggaaagaattgccaaattctttggaaaagatattagcacaacactcaatgcagatgaagcagtagccagaggatgtgcattacagtgtgcaatactttccccggcatttaaagttagagaattttccgtcacagatgcagttccttttccaatatctctgatctggaaccatgattcagaagatactgaaggtgttcatgaagtctttagtcgaaaccatgctgctcctttctccaaagttctcacctttctgagaagggggccttttgagctagaagctttctattctgatccccaaggagttccatatccagaagcaaaaataggccgctttgtagttcagaatgtttctgcacagaaagatggagaaaaatctagagtaaaagtcaaagtgcgagtcaacacccatggcattttcaccatctctacggcatctatggtggagaaagtcccaactgaggagaatgaaatgtcttctgaagctgacatggagtgtctgaatcagagaccaccagaaaacccagacactgataaaaatgtccagcaagacaacagtgaagctggaacacagccccaggtacaaactgatgctcaacaaacctcacagtctcccccttcacctgaacttacctcagaagaaaacaaaatcccagatgctgacaaagcaaatgaaaaaaaagttgaccagcctccagaagctaaaaagcccaaaataaaggtggtgaatgttgagctgcctattgaagccaacttggtctggcagttagggaaagaccttcttaacatgtatattgagacagagggtaagatgataatgcaagataaattggaaaaagaaaggaatgatgctaaaaatgcagttgaggaatatgtgtatgagttcagagacaagctgtgtggaccatatgaaaaatttatatgtgagcaggatcatcaaaattttttgagactcctcacagaaactgaagactggctgtatgaagaaggagaggaccaagctaaacaagcatatgttgacaagttggaagaattaatgaaaattggcactccagttaaagttcggtttcaggaagctgaagaacggccaaaaatgtttgaagaactaggacagaggctgcagcattatgccaagatagcagctgacttcagaaataaggatgagaaatacaaccatattgatgagtctgaaatgaaaaaagtggagaagtctgttaatgaagtgatggaatggatgaataatgtcatgaatgctcaggctaaaaagagtcttgatcaggatccagttgtacgtgctcaggaaattaaaacaaaaatcaaggaattgaacaacacatgtgaacccgttgtaacacaaccgaaaccaaaaattgaatcacccaaactggaaagaactccaaatggcccaaatattgataaaaaggaagaagatttagaagacaaaaacaattttggtgctgaacctccacatcagaatggtgaatgttaccctaatgagaaaaattctgttaatatggacttggactagataaccttaaattggcctattccttcaattaataaaatatttttgccatagtatgtgactctacataacatactgaaactatttatattttcttttttaaggatatttagaaattttgtgtattatatggaaaaagaaaaaaagcttaagtctgtagtctttatgatcctaaaagggaaaattgccttggtaactttcagattcctgtggaattgtgaattcatactaagctttctgtgcagtctcaccatttgcatcactgaggatgaaactgacttttgtcttttggagaaaaaaaactgtactgcttgttcaagagggctgtgattaaaatctttaagcatttgttcctgccaaggtagttttcttgcattttgctctccattcagcatgtgtgtgggtgtggatgtttataaacaagactaagtctgacttcataagggctttctaaaaccatttctgtccaagagaaaatgactttttgctttgatattaaaaattcaatgagtaaaacaaaagctagtcaaatgtgttagcagcatgcagaacaaaaactttaaactttctctctcactatacagtatattgtcatgtgaaagtgtggaatggaagaaatgtcgatcctgttgtaactgattgtgaacacttttatgagctttaaaataaagttcatcttatggtgtcatttct

SEQ ID NO: 86 - DNA, 1600 bp, Homo sapiens
  ref <308>: DATABASE ACCESSION NUMBER: AF001601
  ref <309>: DATABASE ENTRY DATE: 2001-06-18
cggagcgaggcagcgcgcccggctcccgcgccatggggcggctggtggctgtgggcttgctggggatcgcgctggcgctcctgggcgagaggcttctggcactcagaaatcgacttaaagcctccagagaagtagaatctgtagaccttccacactgccacctgattaaaggaattgaagctggctctgaagatattgacatacttcccaatggtctggctttttttagtgtgggtctaaaattcccaggactccacagctttgcaccagataagcctggaggaatactaatgatggatctaaaagaagaaaaaccaagggcacgggaattaagaatcagtcgtgggtttgatttggcctcattcaatccacatggcatcagcactttcatagacaacgatgacacagtttatctctttgttgtaaaccacccagaattcaagaatacagtggaaatttttaaatttgaagaagcagaaaattctctgttgcatctgaaaacagtcaaacatgagcttcttccaagtgtgaatgacatcacagctgttggaccggcacatttctatgccacaaatgaccactacttctctgatcctttcttaaagtatttagaaacatacttgaacttacactgggcaaatgttgtttactacagtccaaatgaagttaaagtggtagcagaaggatttgattcagcaaatgggatcaatatttcacctgatgataagtatatctatgttgctgacatattggctcatgaaattcatgttttggaaaaacacactaatatgaatttaactcagttgaaggtacttgagctggatacactggtggataatttatctattgatccttcctcgggggacatctgggtagtctgtcatcctaatggccagaagctcttcgtgtatgacccgaacaatcctccctcgtcagaggttctccgcatccagaacattctatctgagaagcctacagtgactacagtttatgccaacaatgggtctgttctccaaggaagttctgtagcctcagtgtatgatgggaagctgctcataggcactttataccacagagccttgtattgtgaactctaaattgtacttttggcatgaaagtgcgataacttaacaattaattttctatgaaattgctaattctgagggaatttaaccagcaacattgacccagaaatgtatggcatgtgtagttaattttattccagtaaggaacggcccttttagttcttagagcacttttaacaaaaaaggaaaatgaacaggttctttaaaatgccaagcaagggacagaaaagaaagctgctttcgaataaagtgaatacattttgcacaaagtaagcctcacctttgccttccaactgccagaacatggattccactgaaatagagtgaattatatttccttaaaatgtgagtgacctcacttctggcactgtgactactatggctgtttagaactactgataataacgtattttgatgttttgtacttacatctttgtttaccattaaaaagttggagttatattaaagactaactaaaatcccaaaaaaaaaaaaaaaaaaaaaaaaaaaaaaaa

SEQ ID NO: 87 - DNA, 502 bp, Homo sapiens
  Modified_base 1 ... 502: n = a,c,g, or t
  ref <308>: DATABASE ACCESSION NUMBER: AI379662
  ref <309>: DATABASE ENTRY DATE: 2001-06-18
aaaagtcagttggaatttcttttaattaaaagaccaaggggacaagaagctcctttgttacagtacattacatatggctcttatgtagaataaaatagacatcagagtcaaatgtttctaccagcaccaaactcttacttgtagcaggtgaacagtgaagcaagatttcttttactggctttgagattgtaatacatcttttacatgcagtgtgttctttggtagacttaatcgttgagtgaaattacagaatttgcaaaggaaaaaaatgtaaaatttgagcacagtacttctcactataagctatttatacagaattcagaaaaaatgtcaatcctagtaagatttttaaatcttcttaaaaacttgctaattagcttctgtgtgttcagacacacaagacaagtgaaatacactgtagtaaataattagttnttaaaatatctttcatgatgtttctggtaattgggctaatctgaagggcatggaatttctttgaact

SEQ ID NO: 88 - DNA, 553 bp, Homo sapiens
  ref <308>: DATABASE ACCESSION NUMBER: AI669720
  ref <309>: DATABASE ENTRY DATE: 2001-06-18
cactaagaaagccagtaactttactgaattgtctgcaaaatacaaattataccttatttccagcaggagaaacttttgaaaatttcccacttttattcactacagacagctgaattaagtcccttgagatacacagatgtggtttaacttagttataacatcttgtcatctagtggcgacaaagtccagcttatgccgctgtgagcctctatttgaatatttgttgcaaatgcttgtatgccctcatttacaagcgattttaattactctcatttaatggaaacaagtccccaggaaaagaaaaagaagaaaaatgatacagcaaaccatctgaagcaatccaagtcctatgcctacagtgacccaggtctactttgctcgaagagaacactggtactgcattcaaaccacaacagaatccgtcacttaactgacctctctgaattaaactgaggtatgaatcaatttgaggtatgaacagggaaggcaaaatgcaataccagattatgaaaataaccaaaatggaaaaatttgatgtagaagatatgtggct

SEQ ID NO: 89 - DNA, 577 bp, Homo sapiens
  Modified_base 1 ... 577: n = a,c,g, or t
  ref <308>: DATABASE ACCESSION NUMBER: AA142949
  ref <309>: DATABASE ENTRY DATE: 2001-06-18
tttttttttttcagatctgtaagtttatttgctcaatgtacgacagctacataatgactcacattcatgatattccatcactgaggaaactgctaaagatggtccgtgtgtgaaataattccttagagaaacacggagctggaaaaataatcactgattagaccttaaaaatagttcactgcataacatgacaaaaagcacaaaggctcattcagagaacatatttgttgttctccaacactgtaatagttataatttcaccatgacaaacaccagacattaagattaagctaacactggtgtttcttttgctcccccccttttaaaaacaaaatatataactgcatgtcactatagcaacatccaaaacagatcaatttgttacaatcactatttggtagagcaaactttacccccaaaaggaaaaattaaattaaaaaaaaaaaaccttaaaaaatttgaagactaattttttttgtctaggaatactaacacctacagtataagttaatccatttcaggcactgttagaaatacacactagctgcccatttgtatcatgagatggngggtatca

SEQ ID NO: 90 - DNA, 4279 bp, Homo sapiens
  ref <308>: DATABASE ACCESSION NUMBER: U43185
  ref <309>: DATABASE ENTRY DATE: 2001-06-18
cagacaggatattcactgctgtggcaaggcctgtagagagtttcgaagttaggaggactcaagacggtccctccctggacttttctgaaggggctcaaaagatgacacgcgccagagctggaaggcgtcgccaattggtccaacttttccctcctccctttttgcggatgagaaaaactgaggcccaggtttgggatttccagagcccgggatttcccggcaacgccgacaaccacattcccccggctattctgacccgccccggttccgggacgctccctgggagccgccgccgagggcctgctgggactcccggggaccccgccgtcggggcagcccccacgcccggcgccgcccgccggaacggcgccgctgttgcgcacttgcaggggagccggcgactgagggcgaggcagggagggagcaagcggggctgggagggctgctggcgcgggctcgccggctgtgtatggtctatcgcaggcagctgacctttgaggaggaaatcgctgctctccgctccttcctgtagtaacagccgccgctgccgccgccgccaggaacccggccgggagcgagagccgcggggcgcagagccggcccggctgccggacggtgcggccccaccaggtgaacggccatggcgggctggatccaggcccagcagctgcagggagacgcgctgcgccagatgcaggtgctgtacggccagcacttccccatcgaggtccggcactacttggcccagtggattgagagccagccatgggatgccattgacttggacaatccccaggacagagcccaagccacccagctcctggagggcctggtgcaggagctgcagaagaaggcggagcaccaggtgggggaagatgggtttttactgaagatcaagctgaggcactacgccacgcagctccagaaaacatatgaccgctgccccctggagctggtccgctgcatccggcacattctgtacaatgaacagaggctggtccgagaagccaacaattgcagctctccggctgggatcctggttgacgccatgtcccagaagcaccttcagatcaaccagacatttgaggagctgcgactggtcacgcaggacacagagaatgagctgaagaaactgcagcagactcaggagtacttcatcatccagtaccaggagagcctgaggatccaagctcagtttgcccagctggcccagctgagcccccaggagcgtctgagccgggagacggccctccagcagaagcaggtgtctctggaggcctggttgcagcgtgaggcacagacactgcagcagtaccgcgtggagctggccgagaagcaccagaagaccctgcagctgctgcggaagcagcagaccatcatcctggatgacgagctgatccagtggaagcggcggcagcagctggccgggaacggcgggccccccgagggcagcctggacgtgctacagtcctggtgtgagaagttggccgagatcatctggcagaaccggcagcagatccgcagggctgagcacctctgccagcagctgcccatccccggcccagtggaggagatgctggccgaggtcaacgccaccatcacggacattatctcagccctggtgaccagcacattcatcattgagaagcagcctcctcaggtcctgaagacccagaccaagtttgcagccaccgtacgcctgctggtgggcgggaagctgaacgtgcacatgaatcccccccaggtgaaggccaccatcatcagtgagcagcaggccaagtctctgcttaaaaatgagaacacccgcaacgagtgcagtggtgagatcctgaacaactgctgcgtgatggagtaccaccaagccacgggcaccctcagtgcccacttcaggaacatgtcactgaagaggatcaagcgtgctgaccggcggggtgcagagtccgtgacagaggagaagttcacagtcctgtttgagtctcagttcagtgttggcagcaatgagcttgtgttccaggtgaagactctgtccctacctgtggttgtcatcgtccacggcagccaggaccacaatgccacggctactgtgctgtgggacaatgcctttgctgagccgggcagggtgccatttgccgtgcctgacaaagtgctgtggccgcagctgtgtgaggcgctcaacatgaaattcaaggccgaagtgcagagcaaccggggcctgaccaaggagaacctcgtgttcctggcgcagaaactgttcaacaacagcagcagccacctggaggactacagtggcctgtccgtgtcctggtcccagttcaacagggagaacttgccgggctggaactacaccttctggcagtggtttgacggggtgatggaggtgttgaagaagcaccacaagccccactggaatgatggggccatcctaggttttgtgaataagcaacaggcccacgacctgctcatcaacaagcccgacgggaccttcttgttgcgctttagtgactcagaaatcgggggcatcaccatcgcctggaagtttgattccccggaacgcaacctgtggaacctgaaaccattcaccacgcgggatttctccatcaggtccctggctgaccggctgggggacctgagctatctcatctatgtgtttcctgaccgccccaaggatgaggtcttctccaagtactacactcctgtgctggctaaagctgttgatggatatgtgaaaccacagatcaagcaagtggtccctgagtttgtgaatgcatctgcagatgctgggggcagcagcgccacgtacatggaccaggccccctccccagctgtgtgcccccaggctccctataacatgtacccacagaaccctgaccatgtactcgatcaggatggagaattcgacctggatgagaccatggatgtggccaggcacgtggaggaactcttacgccgaccaatggacagtcttgactcccgcctctcgccccctgccggtcttttcacctctgccagaggctccctctcatgaatgtttgaatcccacgcttctctttggaaacaatatgcaatgtgaagcggtcgtgttgtgagtttagtaaggctgtgtacactgacacctttgcaggcatgcatgtgcttgtgtgtgtgtgtgtgtgtccttgcgcatgagctacgcctgcctcccctgtgccagtcctgggatgtggctgcagcagcggtggccggcctcttttcagatcatggcatccaagagtgcgccgagtctgtctctgtcatggtagagaccgagcctctgtcactgcaggcactcaatgcagccagacctattcctcctgtgcccctcatctgctcagcagctatttgaatgagatgattcagaaggggaggggagacaggtaacgtctgtaagctgaagtttcactccggagtgagaagctttgccctcctaagagagagagacagagagacagagagagagaaagagagagtgtgtgggtctatgtaaatgcatctgtcctcatgtgttgatgtaaccgattcatctctcagaagggaggctggggttcattttcgagtagtattttatactttagtgaacgtggactccagactctctgtgaaccctatgagagcgcgtctgggcccggccatgtccttagcacaggggggccgccggtttgagtgagggtttctgagctgctctgaattagtccttgcttggctgcttggccttgggttcattcaagctcacgatgctgttcccacgtttcccgggatatatattctctcccctccgttgggccccagccttctttgcttgcctctctgtttgtaaccttgtcgacaaagaggtagaaaagattgggtctaggatatggtgggtggacaggggccccgggacttggagggttggtcctcttgcctcctggaaaaaacaaaaacaaaaaactgcagtgaaagacaagctgcaaatcagccatgtgctgcgtgcctgtggaatctggagtgaggggtaaaagctgatctggtttgactccgctggaggtggggcctggagcaggccttgcgctgttgcgtaactggctgtgttctggtgaggccttgctcccaaccccacacgctcctccctctgaggcgtgaggactcgcagtcaggggcagctgaccatggaagattgagagcccaaggtttaaacttcttctctgaagggaggtggggatgagaagaggggtttttttgtactttgtacaaagaccacacatttgtgtaaacagtgttttgg

SEQ ID NO: 91 - DNA, 1277 bp, Homo sapiens
  ref <308>: DATABASE ACCESSION NUMBER: AF008442
  ref <309>: DATABASE ENTRY DATE: 2001-06-18
gagagagagaagatggcggcttctcaggcggtggaggaaatgcggagccgcgtggttctgggggagtttggggttcgcaatgtccatactactgactttcccggtaactattccggttatgatgatgcctgggaccaggaccgcttcgagaagaatttccgtgtggatgtagtacacatggatgaaaactcactggagtttgacatggtgggaattgacgcagccattgccaatgcttttcgacgaattctgctagctgaggtgccaactatggctgtggagaaggtcctggtgtacaataatacatccattgttcaggatgagattcttgctcaccgtctggggctcattcccattcatgctgatccccgtctttttgagtatcggaaccaaggagatgaagaaggcacagagatagatactctacagtttcgtctccaggtcagatgcactcggaacccccatgctgctaaagattcctctgaccccaacgaactgtacgtgaaccacaaagtgtataccaggcatatgacatggatccccctggggaaccaggctgatctctttccagagggcactatccgaccagtgcatgatgatatcctcatcgctcagctgcggcctggccaagaaattgacctgctcatgcactgtgtcaagggcattggcaaagatcatgccaagttttcaccagtggcaacagccagttacaggctcctgccagacatcaccctgcttgagcccgtggaaggggaggcagctgaggagttgagcaggtgcttctcacctggtgttattgaggtgcaggaagtccaaggtaaaaaggtggccagagttgccaacccccggctggataccttcagcagagaaatcttccggaatgagaagctaaagaaggttgtgaggcttgcccgggttcgagatcattatatcttctctgttgagtcaacgggggtgttgccaccagatgtgctggtgagtgaagccatcaaagtactgatggggaagtgccggcgcttcttggatgaactagatgcggttcagatggactgagcttggatgcttctgaggcaagctgaagctttgggttctgactgacccaccctacaggactgctgaacagagagcccagtgtgactagggatcctgagttttctgggacaattccagctttaatcaatacattttgttaaatgtgccataaaatgagactttttacgcctttataaggccttagatgtaaataaactcacccaaacaaaaaaaaaaaaaaaaaa

SEQ ID NO: 92 - DNA, 459 bp, Homo sapiens
  ref <308>: DATABASE ACCESSION NUMBER: AI275895
  ref <309>: DATABASE ENTRY DATE: 2001-06-18
cactacagatgcaagcatctgattttatttcaaatattttgcatccaagtttgcttacatacacagatattaaacctacagatacaaaaagctgagtgtacttacaaattaataactgtacacaggcagcataaaattctctttgtacatgccaaaaacattccgtgtccacccagggtgaacacagccacttcacaaacagggtgtaaataaggaggttcactaagtacaggaaagttacaagaccatattggcattttaacagccattcctgagaaagagaatgggaaagggcttaagagtcagaggagaggaaaagaggaaaacagatgacctcctacatcagaagatggagcagtgagaatacagaatagggaagcaatagttaaaaaaaaaaaagtagaaacaggatttgatgtcaatttgctgtgcaaagggtaaaaaggggagttttatttc

SEQ ID NO: 93 - DNA, 3362 bp, Homo sapiens
  ref <308>: DATABASE ACCESSION NUMBER: D90224
  ref <309>: DATABASE ENTRY DATE: 2001-06-18
ccatatcttcatcttccctctacccagattgtgaagatggaaagggtccaacccctggaagagaatgtgggaaatgcagccaggccaagattcgagaggaacaagctattgctggtggcctctgtaattcagggactggggctgctcctgtgcttcacctacatctgcctgcacttctctgctcttcaggtatcacatcggtatcctcgaattcaaagtatcaaagtacaatttaccgaatataagaaggagaaaggtttcatcctcacttcccaaaaggaggatgaaatcatgaaggtgcagaacaactcagtcatcatcaactgtgatgggttttatctcatctccctgaagggctacttctcccaggaagtcaacattagccttcattaccagaaggatgaggagcccctcttccaactgaagaaggtcaggtctgtcaactccttgatggtggcctctctgacttacaaagacaaagtctacttgaatgtgaccactgacaatacctccctggatgacttccatgtgaatggcggagaactgattcttatccatcaaaatcctggtgaattctgtgtcctttgaggggctgatggcaatatctaaaaccaggcaccagcatgaacaccaagctgggggtggacagggcatggattcttcattgcaagtgaaggagcctcccagctcagccacgtgggatgtgacaagaagcagatcctggccctcccgcccccacccctcagggatatttaaaacttattttatataccagttaatcttatttatccttatattttctaaattgcctagccgtcacaccccaagattgccttgagcctactaggcacctttgtgagaaagaaaaaatagatgcctcttcttcaagatgcattgtttctattggtcaggcaattgtcataataaacttatgtcattgaaaacggtacctgactaccatttgctggaaatttgacatgtgtgtggcattatcaaaatgaagaggagcaaggagtgaaggagtggggttatgaatctgccaaaggtggtatgaaccaacccctggaagccaaagcggcctctccaaggttaaattgattgcagtttgcatattgcctaaatttaaactttctcatttggtgggggttcaaaagaagaatcagcttgtgaaaaatcaggacttgaagagagccgtctaagaaataccacgtgctttttttctttaccattttgctttcccagcctccaaacatagttaatagaaatttcccttcaaagaactgtctggggatgtgatgctttgaaaaatctaatcagtgacttaagagagattttcttgtatacagggagagtgagataacttattgtgaagggttagctttactgtacaggatagcagggaactggacatctcagggtaaaagtcagtacggattttaatagcctggggaggaaaacacattctttgccacagacaggcaaagcaacacatgctcatcctcctgcctatgctgagatacgcactcagctccatgtcttgtacacacagaaacattgctggtttcaagaaatgaggtgatcctattatcaaattcaatctgatgtcaaatagcactaagaagttattgtgccttatgaaaaataatgatctctgtctagaaataccatagaccatatatagtctcacattgataattgaaactagaagggtctatatcagcctatgccagggcttcaatggaatagtatccccttatgtttagttgaaatgtccccttaacttgatataatgtgttatgcttatggcgctgtgacaatctgatttttcatgtcaacttccagatgatttgtaacttctctgtgccaaaccttttataaacataaatttttgagatatgtattttaaaattgtagcacatgtttccctgacattttcaatagaggatacaacatcacagaatctttctggatgattctgtgttatcaaggaattgtactgtgctacaattatctctagaatctccagaaaggtggagggctgttcgcccttacactaaatggtctcagttggatttttttttcctgttttctatttcctcttaagtacaccttcaactatattcccatccctctattttaatctgttatgaaggaaggtaaataaaaatgctaaatagaagaaattgtaggtaaggtaagaggaatcaagttctgagtggctgccaaggcactcacagaatcataatcatggctaaatatttatggagggcctactgtggaccaggcactggctaaatacttacatttacaagaatcattctgagacagatattcaatgatatctggcttcactactcagaagattgtgtgtgtgtttgtgtgtgtgtgtgtgtgtgtatttcactttttgttattgaccatgttctgcaaaattgcagttactcagtgagtgatatccgaaaaagtaaacgtttatgactataggtaatatttaagaaaatgcatggttcatttttaagtttggaatttttatctatatttctcacagatgtgcagtgcacatgcaggcctaagtatatgttgtgtgtgtttgtctttgacgtcatggtcccctctcttaggtgctcactcgctttgggtgcacctggcctgctcttcccatgttggcctctgcaaccacacagggatatttctgctatgcaccagcctcactccaccttccttccatcaaaaatatgtgtgtgtgtctcagtccctgtaagtcatgtccttcacagggagaattaacccttcgatatacatggcagagttttgtgggaaaagaattgaatgaaaagtcaggagatcagaattttaaatttgacttagccactaactagccatgtaaccttgggaaagtcatttcccatttctgggtcttgcttttctttctgttaaatgagaggaatgttaaatatctaacagtttagaatcttatgcttacagtgttatctgtgaatgcacatattaaatgtctatgttcttgttgctatgagtcaaggagtgtacacttctcctttactatgttgaatgtatttttttctggacaagcttacatcttcctcagccatctttgtgagtccttcaagagcagttatcaattgttagttagatattttctatttagagaatgcttaagggattccaatcccgatccaaatcataatttgttcttaagtatactgggcaggtcccctattttaagtcataattttgtatttagtgctttcctggctctcagagagtattaatattgatattaataatatagttaatagtaatattgctatttacatggaaacaaataaaagatctcagaattc

SEQ ID NO: 94 - DNA, 2648 bp, Homo sapiens
  ref <308>: DATABASE ACCESSION NUMBER: U59919
  ref <309>: DATABASE ENTRY DATE: 2001-06-18
gtgacagaagctgtgggaggagctggaggcttcaccgtggtaatcacagcgccgctgctgccccgccttgcaggtctcaggactgtcatcgcctctgggtgtgagggtactttggccaccgtccccggaaataaccgcgcctgcctctcaagataccccatcctctccacgccgctgccgctgccgccatgcaaggggaggacgccagatacctcaaaaggaaagttaaaggagggaatatagatgtacatccatcagaaaaagcactcattgttcactatgaagtggaagctaccattcttggagaaatgggggaccccatgttgggagaacgaaaagaatgtcaaaaaatcattcgacttaagagtctcaatgccaacacagatataacttccctggcaaggaaggtggttgaagaatgtaaactcattcatccttcaaaactaaatgaggtagaactgctgttgtactatctacagaaccgccgtgattcattgtcaggaaaagagaaaaaagaaaaatcaagcaagcctaaagatccacctccttttgaaggaatggagattgatgaagttgctaacattaatgacatggatgaatatattgagttattatatgaagatattcctgacaaagttcggggttctgctttgatcctgcagcttgctcgaaatcctgataacttggaagaactactattgaatgaaactgcccttggtgcattagcaagggtcctgagagaagactggaagcaaagtgtcgagttagctacaaacataatttacatctttttttgtttctccagcttttctcaatttcatggacttattactcactataaaattggagctctgtgtatgaatattattgatcatgagttaaaaagacatgagctttggcaagaagaactctcaaagaagaagaaagctgttgatgaagaccctgaaaaccaaaccttgagaaaggattatgaaaaaacctttaaaaagtaccaggggcttgtggtaaaacaggaacagctattacgagttgctctttatttgcttctgaatcttgctgaggatactcgtaccgaactgaaaatgaggaacaagaacatagttcacatgttggtgaaagcccttgatcgggacaattttgagctgctaattttagttgtgtcattcttgaagaaactcagcatttttatggagaataaaaatgatatggtggaaatggatattgttgaaaaactggtgaaaatgataccttgtgagcatgaagacctgctgaatatcaccctccgacttttactaaacctatcctttgacacaggactgaggaataagatggtacaagttggactgcttcccaagctcactgcactcctaggcaatgacaactacaaacaaatagcaatgtgtgttctttaccacataagcatggatgaccgctttaaatcaatgtttgcatacactgactgtataccacagttaatgaagatgctgtttgaatgttcagatgaacgaattgacttggaactcatttctttctgcattaatcttgctgctaacaaaagaaatgtacagcttatctgtgaaggaaatgggctgaagatgctcatgaagagggctctgaagtttaaggatccattgctgatgaaaatgattagaaacatttctcagcatgatggaccaactaaaaatctgtttattgattatgttggggaccttgcagcccagatctctaatgatgaagaagaggagttcgtgattgaatgtttgggaactcttgcaaacttgaccattccagacttagactgggaattggttcttaaagaatataagttggttccatacctcaaggataaactaaaaccaggtgctgcagaagatgatcttgttttagaagtggttataatgattggaactgtatccatggatgactcttgtgctgcattgctagccaaatctggcataatccctgcactcattgaattgctaaatgctcaacaagaagatgatgaatttgtgtgtcagataatttatgtcttctaccagatggttttccaccaagccacaagagacgtcataatcaaggaaacacaggctccagcatatctcatagacctaatgcatgataagaataatgaaatccgaaaggtctgtgataatacattagatattatagcggaatatgatgaagaatgggctaagaaaattcagagtgaaaagtttcgctggcataactctcagtggctggagatggtagagagtcgtcagatggatgagagtgagcagtacttgtatggtgatgatcgaattgagccatacattcatgaaggagatattctcgaaagacctgaccttttctacaactcagatggattaattgcctctgaaggagccataagtcccgatttcttcaatgattaccaccttcaaaatggagatgttgttgggcagcattcatttcctggcagccttggaatggatggctttggccaaccagttggcattcttggacgccctgccacagcatatggattccgccctgatgaaccttactactatggctatggatcttgataaagtatctgtttccatgtgtaatctcagcttagaagaaatctgtgtgggttgggttaattttggatctttgcctaataa

SEQ ID NO: 95 - DNA, 662 bp, Homo sapiens
  ref <308>: DATABASE ACCESSION NUMBER: M94856
  ref <309>: DATABASE ENTRY DATE: 2001-06-18
accgccgacgcagacccctctctgcacgccagcccgcccgcacccaccatggccacagttcagcagctggaaggaagatggcgcctggtggacagcaaaggctttgatgaatacatgaaggagctaggagtgggaatagctttgcgaaaaatgggcgcaatggccaagccagattgtatcatcacttgtgatggtaaaaacctcaccataaaaactgagagcactttgaaaacaacacagttttcttgtaccctgggagagaagtttgaagaaaccacagctgatggcagaaaaactcagactgtctgcaactttacagatggtgcattggttcagcatcaggagtgggatgggaaggaaagcacaataacaagaaaattgaaagatgggaaattagtggtggagtgtgtcatgaacaatgtcacctgtactcggatctatgaaaaagtagaataaaaattccatcatcactttggacaggagttaattaagagaatgaccaagctcagttcaatgagcaaatctccatactgtttctttcttttttttttcattactgtgttcaattatctttatcataaacattttacatgcagctatttcaaagtgtgttggattaattaggatcatccctttggttaataaataaatgtgtttgtgct

SEQ ID NO: 96 - DNA, 7332 bp, Homo sapiens
  ref <308>: DATABASE ACCESSION NUMBER: M83822
  ref <309>: DATABASE ENTRY DATE: 2001-06-18
ttcagacaaatttaatcacaatgaccacatataatgtgctgtttgagattcttatagaacagattggtactcaggtgatacataaacagcatccagatcctgattcttcagtgaagatacaaaaccctcagatactaaaagtaattgcgaccctacttcgaaattctccccagtgcccagagagcatggaggttcgcagagcctttctttctgacatgattaaactttttaataacagtagagaaaacaggaggagcttgctacaatgctctgtgtggcaagaatggatgctttctctctgctattttaatcctaagaattcagatgagcaaaagataacagaaatggtatacgccatattcagaatcctgctttaccatgcagtcaaatatgagtggggtggctggcgtgtatgggtagacactttatcaatcactcattcaaaggtcacttttgaaatacacaaagaaaaccttgccaatatatttagggaacagcaaggaaaagttgatgaagaaatagggctgtgttcttcaacttcagttcaagcagcctctggcattagaagggatattaatgtttcagtaggatcccagcaaccagatacgaaggattctcctgtctgtcctcatttcaccacaaatggtaatgaaaattcaagtatagagaagacaagttcactagaatctgcatctaatattgaactgcaaactactaatacatcttatgaagaaatgaaagctgagcaagaaaatcaggagttaccagatgaaggcactttggaagaaacactgacaaatgagacaaggaatgcagatgatttagaagtatcttctgacataatagaagctgtggctatttcctctaattcttttataacaactggcaaagattcaatgactgtcagtgaagtaactgcttctataagttctccttcagaagaggatgcctcagagatgccagaattcttggataaatctatagtagaggaagaggaagatgatgattatgtggaactgaaagtagaaggcagtcctactgaggaagctaatctacccacagagctccaagataacagtttgtctccagctgcatctgaagccggtgaaaaactggacatgtttggtaatgatgacaaattaatatttcaagaaggaaaacctgttactgaaaagcaaactgatactgaaactcaagattctaaagattctggaattcagactatgacagcatcagggtcttcagctatgtcaccagaaactactgtttcccaaatagctgtagaatcagaccttggtcagatgctggaggaagggaagaaagcaactaacctcactagagaaaccaaattaattaatgattgtcatggtagtgtctctgaggcttcttctgagcaaaagattgcgaagttggatgtttccaatgttgctacagatactgagaggctggagttgaaggccagtcccaacgtggaagcacctcaacctcatcgacatgtgcttgagatatcaaggcaacatgagcagccagggcaaggaatagcaccagatgcagttaatggacaaaggagggattccagatctactgtgtttcgtattcctgagttcaactggtctcagatgcatcaacgtttgctcactgatctattattttcaatagaaacagatatacagatgtggagaagccattcaacaaagacagttatggacttcgtgaatagcagtgataatgtcatctttgtacacaacacaattcatctcatctctcaagtgatggacaatatggtcatggcttgtgggggtatactgccattgctttcagctgctacatcggctacacatgaactggaaaatattgaacctactcaaggcctttcaatagaagcctctgtgacatttttgcagaggctaattagccttgtggatgtgcttatatttgcaagttctcttggctttactgaaattgaagctgaaaaaagtatgtcatctggaggaattttgcggcagtgtctccgactagtttgtgcagtcgcagtaaggaattgcttggagtgtcaacagcattcacaactgaaaactaggggagataaagccttgaaaccaatgcatagccttattcctttagggaaatctgcagcgaagagcccagtggacattgtgactggcggtatatctccagtaagagatcttgacaggcttctacaggacatggatattaatcggcttagggcagttgttttcagagacatagaggatagcaaacaagctcaatttttagccttggcagtagtatactttatctctgttcttatggtctccaagtacagagacattttggaaccccaaaatgaaaggcatagccagtcatgtacagaaactggcagtgaaaatgagaatgtatcactctctgaaatcacaccagcagcattcagcactttaactacggcatcagtggaagaatctgaaagcacatcatctgctcgaaggagggactcaggcattggggaagaaacagccactggtttaggaagccatgtggaagtaactcctcacacagcacctcctggtgtcagtgcaggcccagatgcaatcagcgaggtgctatctactctttctttagaagtcaataagtctccggaaaccaaaaatgatagaggaaatgacttggacactaaggctacaccgtcagtttcagtttcaaaaaacgtcaatgtgaaagacattctccgaagcttggttaacataccagcagatggagtcacagtggatcctgcccttctgccaccagcctgccttggagcccttggtgatctatctgtggaacaacccgtgcagttcagatcttttgacagaagtgtcattgttgcagcaaaaaagtcagcagtctcaccttccacctttaatacaagcatacctaccaatgctgtcagtgtggtttcctcagtagattcagcccaagcctcagatatgggaggagaatcaccaggcagtagatcatctaatgcaaaattgccctcagttccaacagttgattcagtttcacaagatccggtttcaaatatgagtattacagagaggcttgaacacgctttggaaaaggcagctcctctccttcgtgagatttttgtggattttgcaccttttctttctcggacacttttgggtagccatggacaagaactgcttatagaaggaacaagtctggtttgcatgaagtcgagtagttcagttgtggaattggttatgctactgtgttctcaggagtggcaaaattctattcagaagaatgcaggccttgcttttatcgaacttgtcaatgaaggaaggttgcttagccagacaatgaaggatcatctagtaagagtagcaaatgaagctgaatttatcctgagcaggcagagagcagaagatattcacagacatgcggaatttgagtcactgtgtgcccagtattctgcagacaaacgagaagatgagaagatgtgtgatcatttgataagagcagcaaaatatcgtgaccacgtgacagcaactcaactaatccagaaaattatcaacattctcacagacaagcatggagcctggggaaattctgcagtgagtcgtcctcttgagttctggcgccttgactactgggaagatgacttgcggcgccggcgacgatttgtgcgtaaccctctaggatcgacacatcctgaagcgacactaaaaacagccgtggaacatgtgtgcatttttaaattgagagagaacagcaaagccacagatgaagatatccttgctaaaggaaaacagtccatcaggagtcaggctttaggaaatcagaactcagaaaacgagatcctcctggaaggcgatgatgatactctgtcatccgtggatgagaaagatttagagaatcttgccggtcctgttagcctgagcacaccagctcagcttgtggccccctctgttgtagtaaagggcactctttctgtcacctcctccgaactctattttgaggtggatgaagaggatcctaacttcaaaaaaatcgaccccaagatcttggcatatacagaagggctgcatggaaaatggctgttcacagagatacgatcaatcttttctcgtcgttatcttttgcaaaatacagccctggagatctttatggcaaacagagttgctgtgatgttcaacttcccagaccctgcaacagtaaagaaagtggttaactttctacctcgtgttggcgttggaacaagttttggattgcctcaaaccagacgtatttcattagctagtccacgtcagctttttaaggcttctaatatgacccagcgatggcaacacagagagatatctaattttgagtacttgatgtttctcaacacgatagcaggacggagttataatgacttaaatcagtatccagtgtttccttgggtcatcactaattatgaatcagaagaactggatcttaccttgcccaccaacttcagagatttgtccaagccaataggagctctgaacccaaaaagagcagcattcttcgctgagcgttatgaatcatgggaagatgatcaagttccaaagtttcactatggtactcattactcaactgcaagttttgttcttgcatggctgctaagaatagaaccctttacaacttatttcctaaatttgcaaggaggcaaatttgatcatgcagatcgaactttttcatcaatttccagagcttggcgaaacagtcagcgtgatacctctgatattaaggagttgatccctgaattttattatctccctgagatgtttgtcaacttcaataattataatcttggagtgatggatgatgggacagtagtgtctgatgtcgaacttcctccttgggccaaaacctcagaagaatttgttcacataaacagattggccctggagagtgaatttgtttcctgccagcttcaccaatggattgatctcatttttggctataaacagcaaggaccagaagctgtccgagccctcaatgtgttctattacttgacctatgaaggagctgtcaatctgaattcaataactgatcctgtgttgagagaggctgttgaagctcaaatccgaagttttggacagactccttctcaactactcatagagccccatcctcccagaggttctgccatgcaagtgagtccattgatgttcacagacaaagcccagcaggatgttatcatggtcctcaagtttccctccaactcccctgttactcacgtggcagccaacacccagcctggtttggcaactcccgctgtgatcacagtcactgctaacaggttatttgcggtgaacaaatggcacaaccttcctgctcatcaaggtgctgtacaagaccagccataccagctgccagtggaaatcgatcctctcatagccagcaatacaggaatgcacaggaggcaaatcactgaccttttagaccaaagtattcaagtgcattcccagtgctttgtcatcacttcagacaaccgctatattctcgtctgtggcttctgggataaaagtttcagagtctattctacagacacaggaagattgatccaagtggtgtttggccattgggatgtcgtcacttgccttgctcgttctgagtcatatattgggggaaattgctacattctctcagggtcacgtgatgcaactcttttgctgtggtattggaatggaaatgcagtgggattggagataacccaggcagtgagactgctgctcctcgggccattttgaccggccatgactatgaggtcacatgtgctgcggtgtgtgcggagctaggcctggtgttgagtggttcacaagaaggaccatgtctcatacattccatgaatggagacttgttgaggaccttggagggtcctgaaaactgcctgaaaccaaaactcattcaggcttcaagagagggtcattgtgtcatattctatgaaaacggcctcttctgtacattcagtgtgaatggaaaactccaggccacgatggaaacagatgataacataagagccatccagctgagccgagatgggcagtacctgctcacaggaggagacagaggagtggtcgtggtccggcaggtgtcggacctcaagcagctctttgcctatccaggatgtgacgctggaatccgggccatggcgctgtcttacgaccagaggtgcatcatttctggcatggcttcaggaagcattgtgctattttacaacactttaaccggtggcatcatgataccaaacccgctactgatggtgacagctgtacatcaactctgcccctaggatgagcagaagtacctggagcataattctcttctaccacatctgaatgtaacttaaatttgctcaaagaagcaaaatattttttaaagttattaataattgctatttttgtagtctttgcttgacttttttgggggggattagcaaagcagaaaactggctgctgggttctgtagttttaaaaaatctatatttttagtcataatgagaagtctattttcaccaattatggaaacatacagtggagcaagtaaaccacttattccagctataatattatgaagaacatttcccatgcatctacaagcttgagaaataggattttcacagtggggaagtgggttacaatattggaataggaaaatttgatgctgtaatttgggtcctgtatttttccaaacaactgtgcttcttcagcactaatatttctgggatttaaatagtaatgtttaaattatggtaaatgtaatttaaaacatctcaattaagtctgtctatcaatattgttcttcaagcatgttttagacctagaaaagtatggtttgggggaggctattttattgtgtggttagcacaaggaatctaatttatagcaagtgtgaaatagttaccattttttcctgatctgtcatcttcatagcacaacaaaacgaaatgatggaaatgctcttgagctcacaacatttgtttttcttttaaagtaaatgcaagtaccaaagctcactactgcggtttgcctgtgcctggacaatgaggcggagccactgttgttggggcacccccttccctccccgggtttgcaaatagaggctaccgggtgctgtattcagcaacacctgttttactatttgttattaaactatcatctccaccttccttttgattagcaatttgtactaagaaacgaaacaatgttatttggtggtgtataattctacttttctagtagattactgtgtggaattctgtgaaaaatatttgagaaaaggcctgtattgcataaataaattctttgtatgttgtgaaaaaaa

SEQ ID NO: 97 - DNA, 1399 bp, Homo sapiens
  ref <308>: DATABASE ACCESSION NUMBER: X74330
  ref <309>: DATABASE ENTRY DATE: 2001-06-18
cttaccgtggcgagttccgcgctcaatggagacgtttgaccccaccgagctgcccgagctgcttaaactttattaccggaggctctttccctactctcagtactatcgctggctcaactacggtggagtgataaagaattactttcaacaccgtgaattttcattcacactgaaagatgatatttacattcgctaccaatccttcaacaaccagagtgatctggaaaaggagatgcagaaaatgaatccatacaagattgatataggcgcagtatattctcacagacccaatcaacacaatacagtgaagctgggagctttccaggctcaggaaaaagaactggtatttgacattgacatgacagactacgacgatgtgaggagatgttgtagttctgcagacatatgtcctaagtgctggaccctcatgacaatggccatacgcatcattgacagagcattgaaggaggactttggatttaagcatcgtctctgggtatattctggaaggagaggtgttcattgttgggtctgtgatgaatcagttagaaaactgtcttctgcagtacgttctgggatagttgagtatttgagccttgtaaagggtggtcaagacgttaaaaagaaagttcacctaagtgaaaaaattcacccttttatcagaaaatctataaacataataaaaaaatactttgaagaatatgccttggttaatcaagatattctcgaaaataaagaaagctgggataagattttagcccttgttcctgaaacaattcatgatgaacttcaacaaagcttccaaaagtctcacaattcacttcagcgttgggagcacttgaagaaagtagccagcagatatcagaataacatcaaaaatgacaaatatggaccctggctggagtgggagattatgctccagtactgttttccacggctggatatcaatgtcagcaaaggaatcaatcatctactgaagagcccttttagtgttcatcctaaaacaggtcgcatctctgtgcctattgatttgcagaaagtggaccagtttgatccatttactgttccgaccataagcttcatctgccgtgaattggatgccatttccactaatgaagaggaaaaagaggagaatgaagctgaatctgatgtcaaacatagaaccagagattataagaagaccagtctagcaccttatgtgaaagtttttgaacattttcttgaaaatctggataaatcccgaaaaggagaacttcttaagaagagtgatttacaaaaagatttctgaagacagagctcctcaaaccattgtggatatcttctgccttcaaccacagatcaaatacttcaagagccatttaataaatatggcagaactataaagaaaaaaaaaaaaagg

SEQ ID NO: 98 - DNA, 1216 bp, Homo sapiens
  ref <308>: DATABASE ACCESSION NUMBER: M32578
  ref <309>: DATABASE ENTRY DATE: 2001-06-18
agttctccctgagtgagacttgcctgctcctctggcccctggtcctgtcctgttctccagcatggtgtgtctgaagctccctggaggttcctacatggcagtgctgacagtgacactgatggtgctgagctccccactggctttggctggggacacccgaccatgtttcttgcagcaggataagtatgagtgtcatttcttcaacgggacggagcgggtgcggttcctgcacagaggcatctataaccaacaggagaacgtgcgcttcgacagcgacgtgggggagtaccgggcggtgacggagctggggcggcctgacgctgagtactggaacagccagaaggacatcctggagcaggcgcgggccgcggtggacacctactgcagacacaactacggggctgtggagagcttcacagtgcagcggcgagttgagcctaaggtgactgtgtatcctgcaaggacccagaccctgcagcaccacaacctcctggtctgctctgtgaatggtttctatccaggcagcattgaagtcaggtggttccggaacggccaggaagagaaggctggggtggtgtccacaggcctgattcagaatggagactggaccttccagattctggtgatgctggaaacagttcctcggagtggagaggtttacacctgccaagtggagcacccaagcgtgacgagccctctcacagtggaatggagagcacagtctgaatctgcacagagcaagatgctgagtggaatcgggggctttgtgctgggcctgctcttccttggggccgggctattcatctacttcaagaatcagaaagggcactctggacttcacccaacaggactcgtgagctgaagtgcagatgaccacattcaagggggaaccttctgccccagctttgcatgatgaaaagctttcctgcttggctcttattcttccacaagagaggactttctcaggccctggttgctaccggttcagcaactctgcagaaaatgtccatccttgtggcttcctcagctcctgcccttggcctgaagtcccagcattgatggcagtgcctcatcttcaactttagtgctcccctttacctaaccctacggcctcccatgcatctgtactccccctgtgccacaaatggactacgttattaaatttttctgaagcccagagttaaaaatcatctgtccacctggcaccaaagacaaa

SEQ ID NO: 99 - DNA, 644 bp, Homo sapiens
  ref <308>: DATABASE ACCESSION NUMBER: AF040105
  ref <309>: DATABASE ENTRY DATE: 2001-06-18
gcgcgggcggctggggaatggctgctgccatggtgccggggcgcagcgagagctgggagcgcggggagcctggccgcccggccctgtacttctgcgggagcattcgcggcggacgcgaggacaggacgctgtacgagcggatcgtgtctcggctgcggcgattcgggacagtgctcaccgagcacgtggcggccgccgagctgggcgcgcgcggggaagaggctgctgggggtgacaggctcatccatgagcaggacctggagtggctgcagcaggcggacgtggtcgtggcagaagtgacacagccatccttgggtgtaggctatgagctgggccgggccgtggcctttaacaagcggatcctgtgcctgttccgcccgcagtctggccgcgtgctttcggccatgatccggggagcagcagatggctctcggttccaggtgtgggactatgaggagggagaggtggaggccctgctggatcgatacttcgaggctgatcctccagggcaggtggctgcctcccctgacccaaccacttgacttaatctcactttcttaaattcttctattctcagacactgctctagtaccattccttcctcttagccccaggagcaaattaaaaggtacagttaaaatcct

SEQ ID NO: 100 - DNA, 1652 bp, Homo sapiens
  ref <308>: DATABASE ACCESSION NUMBER: U53003
  ref <309>: DATABASE ENTRY DATE: 2001-06-18
tcccgacgagcaacgcgtttgtagaggggtgggtgcgcacgctctgtccctgcgtgaccttccgaccccgctgtcctcaccgcaatggcggctgtgagggccctggtggcctcgaggctcgctgcggcatctgcattcacgtccctgtcccccggcggtcggacgccttcccagcgcgcagcccttcacctctccgtgccgcgccccgcggccagggtcgcgctggtgctgtctggatgcggagtctacgatgggaccgagatccacgaggcctcggcgatcctggtgcacctgagccgtggaggggctgaagtccagatctttgctcctgacgtccctcagatgcacgtgattgaccacaccaaggggcagccgtccgaaggcgagagcaggaatgttttgaccgagtctgcgaggatcgcccgtggcaaaatcacagacctggccaacctcagtgcagccaaccatgatgctgccatctttccaggaggctttggagcggctaaaaacctgagcacgtttgccgtggacgggaaagattgcaaggtgaataaagaagtggagcgtgtcctgaaggagttccaccaggccgggaagcccatcggcttgtgctgcattgcacctgtcctcgcggccaaggtgctcagaggcgtcgaggtgactgtgggccacgagcaggaggaaggtggcaagtggccttatgccgggaccgcagaggccatcaaggccctgggtgccaagcactgcgtgaaggaagtggtcgaagctcacgtggaccagaaaaacaaggtggtcacgaccccagccttcatgtgcgagacggcactccactacatccatgatgggatcggagccatggtgaggaaggtgctggaactcactggaaagtgacgcgcatggacggggcccagctaggcgccaggacttggcctcaccctctggctgaggagctgtcggctgctttccatccagctgggagtctggcaggcccttttttttttttctttgccgaaacctgcaggcgttctctctctaaggaggatgtgctgcagtgcatgggggatgtttcttcctgggtgtggctgggctgctctcacatacagaggccgaggggccaattcgttctctgccacagggacttgcctcactgtgtcccaaaaacaaatcgcagccagcttttccagaaatagaaaattctgccgtctgaggttttatacttcaggttagttagtttttggaaggaagaacatttttaggtttgcaagcctcctgatcaggaaaccagaaataccacatttatggaccatgaaaggttggttcttgactctgaagggacttttgagttaatcagcgtaaggggatttctaaagcaggcaatccctgtagccgcagagaataaacgccttcccaaaatggcaacttcccacagccacatttcagacctgctgagactgctgagtgaggaatggcagtgaggtttcttcaattagtctcagttctcttaattttcaggaagaaagggaaattgcagctcctcagcccccaggattgacctctggggagtgatggtagcgttggtgccaggccgtgggttcaggtgtggcagaagcttgcagatgcgtccgaagggaaataaagtgtgttggcgttag

SEQ ID NO: 101 - DNA, 449 bp, Homo sapiens
  ref <308>: DATABASE ACCESSION NUMBER: AI253387
  ref <309>: DATABASE ENTRY DATE: 2001-06-18
gcgtggtcgcggccgaggtaccttcttttttttttttttttttgagaacggagtcttgctttgtcacccaggctggactgcagtggcatgatctcggctctgcaacctccatctcccaggttcaagcgattctcctgcctcagcctcccaagtagctgggattacaggcaggcaccactatgcctggctaattttttgtatttttagtagatatggggattcaccatgttggtcaggctggtctcgaactcctgaccttgtgatctgcctgcctcggcctcccagtattgggattacaggcatgagccaccatgcccggccttaaaatgccttcttaaggaaaaatgccaactccatccttaatctaaggaaatctgattgtccaatagatctgttaatatgtaacatattaataggtacttgcctgtgtaaaatataagccatattta

SEQ ID NO: 102 - DNA, 3080 bp, Homo sapiens
  ref <308>: DATABASE ACCESSION NUMBER: Z11692
  ref <309>: DATABASE ENTRY DATE: 2001-06-18
atggttaattttacggtggatcagatccgcgccatcatggacaagaaggccaacatccgcaacatgtctgtcatcgcccacgtggaccatggcaagtccacgctgacagactccctggtgtgcaaggcgggcatcatcgcctcggcccgggccggggagacacgcttcactgatacccggaaggacgagcaggagcgttgcatcaccatcaagtcaactgccatctccctcttctacgagctctcggagaatgacttgaacttcatcaagcagagcaaggacggtgccggcttcctcatcaacctcattgactcccccgggcatgtcgacttctcctcggaggtgactgctgccctccgagtcaccgatggcgcattggtggtggtggactgcgtgtcaggcgtgtgcgtgcagacggagacagtgctgcggcaggccattgccgagcgcatcaagcctgtgctgatgatgaacaagatggaccgcgccctgctggagctgcagctggagcccgaggagctctaccagactttccagcgcatcgtggagaacgtgaacgtcatcatctccacctacggcgagggcgagagcggccccatgggcaacatcatgatcgatcctgtcctcggtaccgtgggctttgggtctggcctccacgggtgggccttcaccctgaagcagtttgccgagatgtatgtggccaagttcgccgccaagggggagggccagttggggcctgccgagcgggccaagaaagtagaggacatgatgaagaagctgtggggtgacaggtactttgacccagccaacggcaagttcagcaagtcagccaccagccccgaagggaagaagctgccacgcaccttctgccagctgatcctggaccccatcttcaaggtgtttgatgcgatcatgaatttcaagaaagaggagacagcaaaactgatagagaaactggacatcaaactggacagcgaggacaaggacaaagaaggcaaacccctgctgaaggctgtgatgcgccgctggctgcctgccggagacgccttgttgcagatgatcaccatccacctgccctcccctgtgacggcccagaagtaccgctgcgagctcctgtacgaggggcccccggacgacgaggctgccatgggcattaaaagctgtgaccccaaaggccctcttatgatgtatatttccaaaatggtgccaacctccgacaaaggtcggttctacgcctttggacgagtcttctcggggctggtctccactggcctgaaggtcaggatcatggggcccaactatacccctgggaagaaggaggacctctacctgaagccaatccagagaacaatcttgatgatgggccgctacgtggagcccatcgaggatgtgccttgtgggaacattgtgggcctcgtgggcgtggaccagttcctggtgaagacgggcaccatcaccaccttcgagcacgcgcacaacatgcgggtgatgaagttcagcgtcagccctgttgtcagagtggccgtggaggccaagaacccggctgacctgcccaagctggtggaggggctgaagcggctggccaagtccgaccccatggtgcagtgcatcatcgaggagtcgggagagcacatcatcgcgggcgccggcgagctgcacctggagatctgcctgaaggacctggaggaggaccacgcctgcatccccatcaagaaatctgacccggtcgtctcgtaccgcgagacggtcagtgaagagtcgaacgtgctctgcctctccaagtcccccaacaagcacaaccggctgtacatgaaggcgcggcccttccccgacggcctggccgaggacatcgataaaggcgaggtgtccgcccgtcaggagctcaagcagcgggcgcgctacctggccgagaagtacgagtgggacgtggctgaggcccgcaagatctggtgctttgggcccgacggcaccggccccaacatcctcaccgacatcaccaagggtgtgcagtacctcaacgagatcaaggacagtgtggtggccggcttccagtgggccaccaaggagggcgcactgtgtgaggagaacatgcggggtgtgcgcttcgacgtccacgacgtcaccctgcacgccgacgccatccaccgcggagggggccagatcatccccacagcacggcgctgcctctatgccagtgtgctgaccgcccagccacgcctcatggagcccatctaccttgtggagatccagtgtccagagcaggtggtcggtggcatctacggggttttgaacaggaagcggggccacgtgttcgaggagtcccaggtggccggcacccccatgtttgtggtcaaggcctatctgcccgtcaacgagtcctttggcttcaccgctgacctgaggtccaacacgggcggccaggcgttcccccagtgtgtgtttgaccactggcagatcctgcccggagaccccttcgacaacagcagccgccccagccaggtggtggcggagacccgcaagcgcaagggcctgaaagaaggcatccctgccctggacaacttcctggacaaattgtaggcggcccttcctgcagcgcctgccgccccggggactcgcagcacccacagcaccacgtcctcgaattctcagacgacacctggagactgtcccgacacagcgacgctcccctgagaggtttctggggcccgctgcgtgccatcactcaaccataacacttgatgccgtttctttcaatatttatttccagagtccggaggcagcagacacgccctcttagtagggacttaatgggccggtcggggagggggaggcgggatgggacacccaacactttttccatttcttcagagggaaactcagatgtccaaactaattttaacaaacgcattaagaggtttatttgggtacatggcccgcagtggcttttgccccagaaaggggaaaggaacacgcgggtagatgatttctagcaggcaggaagtcctgtgcggtgtcaccatgagcacctccagctgtactagtgccattggaataataaatttgataaggtggtgaaaaaa

SEQ ID NO: 103 - DNA, 2149 bp, Homo sapiens
  ref <308>: DATABASE ACCESSION NUMBER: S73885
  ref <309>: DATABASE ENTRY DATE: 2001-06-18
gacctgcaaacacacacacacacacacacacacacacacacacacacacacatacacacgcaccagggcagccgagagacctccctcccgcccctcccatgcccgcctccctcccctcgccgccgccgccgccgccagcatctgggaccggccgattctgcacctccgtccggcgctgccctttgattcggatttccatcttgcattctccggctgatcgcgggacctggctcgtgcagaggaggggggccgatcgctatggagtatttcatggtgcccactcagaaggtgccctctttgcaacatttcaggaaaacagagaaagaagtgataggagggctctgtagccttgccaacattccactaacccccgagactcagcgggaccaggagcggcggattcggcgggagatcgccaacagcaacgagcggagacgcatgcagagcatcaacgcgggattccagtccctcaagaccctcatcccccacacagacggagagaagctcagcaaggcagccattctccagcagacagccgagtacatcttctccctggagcaggagaagaccaggctcttgcagcagaacacacagctcaagcgcttcatccaggagctgagcggctcgtcccccaagcgacggcgggcagaggacaaggacgaaggcataggctccccggacatctgggaggacgagaaggcggaggacctgcggcgggagatgattgagctgcggcagcagctggacaaggagcgctcggtgcgcatgatgctggaggagcaggtgcgctcgctggaggcccacatgtacccggaaaagctcaaggtgattgcgcagcaggtgcagctgcagcagcagcaggaacaggtgaggctgctgcaccaggagaagctggagcgggaacagcagcagctgcggacccagcttctgccccctccggcccccacccaccaccccacggtgatcgtgccagcaccgcctcctcctccctcccaccacatcaatgtcgtcaccatgggcccctcctcggtcatcaactctgtttccacatcccggcaaaatctggacaccatcgtgcaggcaatccagcacatcgagggcacccaggaaaagcaggagctggaggaggagcagcggcgagctgtcatcgtgaagcctgtccgcagctgcccggaggcccccacctctgacaccgcctccgactccgaggcctcagacagtgacgccatggaccagagccgggaggagccgtcgggggacggggagcttccctgactacccccccagccctcctctcccttctgggggctggagggagccggggcagccacagggagagacatgggcgaatgagtgagaaatttttacaaaattacgatgtcatttgggtctcttttatgacctctttttcaatactgtaaatcgacctttgaacgaagccactcaacccgaggtcccggggctggggtgtcgcagagctgtgggagcatcggcaccccagggcggggcctcggccccgggggctggaggaagctgacacggagatgcctggcctctctctgccaaaaagcattttttcctttaaatatgttttttaagaacagggaaaattaaacaaaaccccaggttatttcttccctgcccagagccagcctgggattgtcagccttcaatcccctttccttcctctttttgggttttcttctttctcctttaagcacttacatggttgggggtaagactaggctggggcattctgggggcccggaggtctccgttgcttcttggttggggtttgctgctgctgtgcccccctcccccttccccatctcggcactagaattcgccactctcccaccccccagcccccacctctgcctccaggtctcatcttccaccccaaaaatgtctgtctctctctttttgttttgtttgttgttggttttttatttctttttggtttgctttctgtttttgttttgtttttcttttttttctttcttttttttttttttacaattttgaggtcttcgtgttcaaggagaagctattatattttgttaagaaagtggggagaaaaaaaaccaagaggccaccgtgcctttgtaaagaaacaaaataaagtttgtactttgttttttaaaaaaaa

SEQ ID NO: 104 - DNA, 1709 bp, Homo sapiens
  ref <308>: DATABASE ACCESSION NUMBER: X07696
  ref <309>: DATABASE ENTRY DATE: 2001-06-18
ggtacctcctgccagcacctcttgggtttgctgagaactcacgggctccagctacctggccatgaccaccacatttctgcaaacttcttcctccacctttgggggtggctcaacccgagggggttccctcctggctgggggaggtggctttggtggggggagtctctctgggggaggtggaagccgaagtatctcagcttcttctgctaggtttgtctcttcagggtcaggaggaggatatgggggtggcatgagggtctgtggctttggtggaggggctggtagtgttttcggtggaggctttggagggggcgttggtgggggttttggtggtggctttggtggtggcgatggtggtctcctctctggcaatgagaaaattaccatgcagaacctcaatgaccgcctggcctcctacctggacaaggtacgtgccctggaggaggccaatgctgacctggaggtgaagatccatgactggtaccagaagcagaccccagccagcccagaatgcgactacagccaatacttcaagaccattgaagagctccgggacaagatcatggccaccaccatcgacaactcccgggtcatcctggagatcgacaatgccaggctggctgcggacgacttcaggctcaagtatgagaatgagctggccctgcgccagggcgttgaggctgacatcaacggcttgcgccgagtcctggatgagctgaccctggccaggactgacctggagatgcagatcgagggcctgaatgaggagctagcctacctgaagaagaaccacgaagaggagatgaaggagttcagcagccagctggccggccaggtcaatgtggagatggacgcagcaccgggtgtggacctgacccgtgtgctggcagagatgagggagcagtacgaggccatggcggagaagaaccgccgggatgtcgaggcctggttcttcagcaagactgaggagctgaacaaagaggtggcctccaacacagaaatgatccagaccagcaagacggagatcacagacctgagacgcacgatgcaggagctggagatcgagctgcagtcccagctcagcatgaaagctgggctggagaactcactggccgagacagagtgccgctatgccacgcagctgcagcagatccaggggctcattggtggcctggaggcccagctgagtgagctccgatgcgagatggaggctcagaaccaggagtacaagatgctgcttgacataaagacacggctggagcaggagatcgctacttaccgcagcctgctcgagggccaggatgccaagatggctggcattggcatcagggaagcctcttcaggaggtggtggtagcagcagcaatttccacatcaatgtagaagagtcagtggatggacaggtggtttcttcccacaagagagaaatctaagtgtctattgcaggagaaacgtcccttgccactccccactctcatcaggccaagtggaggactggccagagggcctgcacatgcaaactccagtccctgccttcagagagctgaaaagggtccctcggtcttttatttcagggctttgcatgcgctctattccccctctgcctctccccaccttctttggagcaaggagatgcagctgtattgtgtaacaagctcatttgtacagtgtctgttcatgtaataaagaattacttttccttttgcaaat

SEQ ID NO: 105 - DNA, 498 bp, Homo sapiens
  ref <308>: DATABASE ACCESSION NUMBER: J02984
  ref <309>: DATABASE ENTRY DATE: 2001-06-18
aaagcgatctcttctgaggatccggcaagatggcagaagtagagcagaagaagaagcggaccttccgcaagttcacctaccgcggcgtggacctcgaccagctgctggacatgtcctacgagcagctgatgcagctgtacagtgcgcgccagcggcggcggctgaaccggggcctgcggcggaagcagcactccctgctgaagcgcctgcgcaaggccaagaaggaggcgccgcccatggagaagccggaagtggtgaagacgcacctgcgggacatgatcatcctacccgagatggtgggcagcatggtgggcgtctacaacggcaagaccttcaaccaggtggagatcaagcccgagatgatcggccactacctgggcgagttctccatcacctacaagcccgtaaagcatggccggcccggcatcggggccacccactcctcccgcttcatccctctcaagtaatggctcagctaataaaggcgcacatgactcc

SEQ ID NO: 106 - DNA, 2593 bp, Homo sapiens
  ref <308>: DATABASE ACCESSION NUMBER: X87176
  ref <309>: DATABASE ENTRY DATE: 2001-06-18
ggccagcgcgtctgcttgttcgtgtgtgtgtcgttgcaggccttattcatgggctcaccgctgaggttcgacgggcgggtggtactggtcaccggcgcgggggcaggattgggccgagcctatgccctggcttttgcagaaagaggagcgttagttgttgtgaatgatttgggaggggacttcaaaggagttggtaaaggctccttagctgctgataaggttgttgaagaaataagaaggagaggtggaaaagcagtggccaactatgattcagtggaagaaggagagaaggttgtgaagacagccctggatgcttttggaagaatagatgttgtggtcaacaatgctggaattctgagggatcgttcctttgctaggataagtgatgaagactgggatataatccacagagttcatttgcggggttcattccaagtgacacgggcagcatgggaacacatgaagaaacagaagtatggaaggattattatgacttcatcagcttcaggaatatatggcaactttggccaggccaattatagtgctgcaaagttgggtcttctgggccttgcaaattctcttgcaattgaaggcaggaaaagcaacattcattgtaacaccattgctcctaatgcgggatcacggatgactcagacagttatgcctgaagatcttgtggaagccctgaagccagagtatgtggcacctcttgtcctttggctttgtcacgagagttgtgaggagaatggtggcttgtttgaggttggagcaggatggattggaaaattacgctgggagcggactcttggagctattgtaagacaaaagaatcacccaatgactcctgaggcagtcaaggctaactggaagaagatctgtgactttgagaatgccagcaagcctcagagtatccaagaatcaactggcagtataattgaagttctgagtaaaatagattcagaaggaggagtttcagcaaatcatactagtcgtgcaacgtctacagcaacatcaggatttgctggagctattggccagaaactccctccattttcttatgcttatacggaactggaagctattatgtatgcccttggagtgggagcgtcaatcaaggatccaaaagatttgaaatttatttatgaaggaagttctgatttctcctgtttgcccaccttcggagttatcataggtcagaaatctatgatgggtggaggattagcagaaattcctggactttcaatcaactttgcaaaggttcttcatggagagcagtacttagagttatataaaccacttcccagagcaggaaaattaaaatgtgaagcagttgttgctgatgtcctagataaaggatccggtgtagtgattattatggatgtctattcttattctgagaaggaacttatatgccacaatcagttctctctctttcttgttggctctggaggctttggtggaaaacggacatcagacaaagtcaaggtagctgtagccatacctaatagacctcctgatgctgtacttacagataccacctctcttaatcaggctgctttgtaccgcctcagtggagactggaatcccttacacattgatcctaactttgctagtctagcaggttttgacaagcccatattacatggattatgtacatttggattttctgccaggcgtgtgttacagcagtttgcagataatgatgtgtcaagattcaaggcaattaaggctcgttttgcaaaaccagtatatccaggacaaactctacaaactgagatgtggaaggaaggaaacagaattcattttcaaaccaaggtccaagaaactggagacattgtcatttcaaatgcatatgtggatcttgcaccaacatctggtacttcagctaagacaccctctgagggcgggaagcttcagagtacctttgtatttgaggaaataggacgccgcctaaaggatattgggcctgaggtggtgaagaaagtaaatgctgtatttgagtggcatataaccaaaggcggaaatattggggctaagtggactattgacctgaaaagtggttctggaaaagtgtaccaaggccctgcaaaaggtgctgctgatacaacaatcatactttcagatgaagatttcatggaggtggtcctgggcaagcttgaccctcagaaggcattctttagtggcaggctgaaggccagagggaacatcatgctgagccagaaacttcagatgattcttaaagactacgccaagctctgaagggcacactacactattaataaaaatggaatcattaaatactctcttcacccaaatatgcttgattattctgcaaaagtgattagaactaagatgcaggggaaattgcttaacattttcagatatcagataactgcagattttcattttctactaattttcatgtatcattatttttacaaggaactatatataagctagcacatgattatccttctgttcttagatctgtatcttcataataaaaaattttgcccaagtcctgtttccttagaatttgtgatagcattgataagttgaaaggaaaattaaatcaataaaggcctttgatacc

SEQ ID NO: 107 - DNA, 1238 bp, Homo sapiens
  ref <308>: DATABASE ACCESSION NUMBER: M16279
  ref <309>: DATABASE ENTRY DATE: 2001-06-18
cgtggaggccggggcggggcgggcgcagccggcgctgagcttgcagggccgctcccctcacccgcccccttcgagtccccgggcttcaccccacccggcccgtgggggagtatctgtcctgccgccttcgcccacgccctgcactccgggaccgtccctgcgcgctctgggcgcaccatggcccgcggggctgcgctggcgctgctgctcttcggcctgctgggtgttctggtcgccgccccggatggtggtttcgatttatccgatgcccttcctgacaatgaaaacaagaaacccactgcaatccccaagaaacccagtgctggggatgactttgacttaggagatgctgttgttgatggagaaaatgacgacccacgaccaccgaacccacccaaaccgatgccaaatccaaaccccaaccaccctagttcctccggtagcttttcagatgctgaccttgcggatggcgtttcaggtggagaaggaaaaggaggcagtgatggtggaggcagccacaggaaagaaggggaagaggccgacgccccaggcgtgatccccgggattgtgggggctgtcgtggtcgccgtggctggagccatctctagcttcattgcttaccagaaaaagaagctatgcttcaaagaaaatgcagaacaaggggaggtggacatggagagccaccggaatgccaacgcagagccagctgttcagcgtactcttttagagaaatagaagattgtcggcagaaacagcccaggcgttggcagcagggttagaacagctgcctgaggctcctccctgaaggacacctgcctgagagcagagatggaggccttctgttcacggcggattctttgttttaatcttgcgatgtgctttgcttgttgctgggcggatgatgtttactaacgatgaattttacatccaaagggggataggcacttggacccccattctccaaggcccgggggggcggtttcccatgggatgtgaaaggctggccattattaagtccctgtaactcaaatgtcaaccccaccgaggcacccccccgtcccccagaatcttggctgtttacaaatcacgtgtccatcgagcacgtctgaaacccctggtagccccgacttctttttaattaaaataaggtaagcccttcaatttgtttcttcaatatttctttcatttgtagggatatttgtttttcatatcagactaataaaaagaaattagaaacc

SEQ ID NO: 108 - DNA, 1654 bp, Homo sapiens
  ref <308>: DATABASE ACCESSION NUMBER: J04208
  ref <309>: DATABASE ENTRY DATE: 2001-06-18
gaattcgggcggtcctcggagacacgcggcggtgtcctgtgttggccatggccgactacctgattagtgggggcacgtcctacgtgccagacgacggactcacagcacagcagctcttcaactgcggagacggcctcacctacaatgactttctcattctccctgggtacatcgacttcactgcagaccaggtggacctgacttctgctctgaccaagaaaatcactcttaagaccccactggtttcctctcccatggacacagtcacagaggctgggatggccatagcaatggcgcttacaggcggtattggcttcatccaccacaactgtacacctgaattccaggccaatgaagttcggaaagtgaagaaatatgaacagggattcatcacagaccctgtggtcctcagccccaaggatcgcgtgcgggatgtttttgaggccaaggcccggcatggtttctgcggtatcccaatcacagacacaggccggatggggagccgcttggtgggcatcatctcctccagggacattgattttctcaaagaggaggaacatgactgtttcttggaagagataatgacaaagagggaagacttggtggtagccccccgcagcatcacactgaaggaggcaaatgaaattctgcagcgcagcaagaagggaaagttgcccattgtaaatgaagatgatgagcttgtggccatcattgcccggacagacctgaagaagaatcgggactacccactagcctccaaagatgccaagaaacagctgctgtgtggggcagccattggcactcatgaggatgacaagtataggctggacttgctcgcccaggctggtgtggatgtagtggttttggactcttcccagggaaattccatcttccagatcaatatgatcaagtacatcaaagacaaataccctaatctccaagtcattggaggcaatgtggtcactgctgcccaggccaagaacctcattgatgcaggtgtggatgccctgcgggtgggcatgggaagtggctccatctgcattacgcaggaagtgctggcctgtgggcggccccaagcaacagcagtgtacaaggtgtcagagtatgcacggcgctttggtgttccggtcattgctgatggaggaatccaaaatgtgggtcatattgcgaaagccttggcccttggggcctccacagtcatgatgggctctctcctggctgccaccactgaggcccctggtgaatacttcttttccgatgggatccggctaaagaaatatcgcggtatgggttctctcgatgccatggacaagcacctcagcagccagaacagatatttcagtgaagctgacaaaatcaaagtggcccagggagtgtctggtgctgtgcaggacaaagggtcaatccacaaatttgtcccttacctgattgctggcatccaacactcatgccaggacattggtgccaagagcttgacccaagtccgagccatgatgtactctggggagcttaagtttgagaagagaacgtcctcagcccaggtggaaggtggcgtccatagcctccattcgtatgagaagcggcttttctgaaaagggatccagcacacctcctcggtttttttttcaataaaagtttagaaagacccgaattc

SEQ ID NO: 109 - DNA, 1362 bp, Homo sapiens
  ref <308>: DATABASE ACCESSION NUMBER: U79291
  ref <309>: DATABASE ENTRY DATE: 2001-06-18
attaaatatgcacaatattccatagctcactgaggattttaaaattataagcataggattttatattttggggtgaaagaattatctggcacattaggtattggagtttaaaaaaaaagccaaatttcacagtcttaataactttttttaaaaaaaactaaaaggcgcttcatgtccagtgtgtggcccttctgaaacttatggtcatctctcccactgaaaccaaggtcttttcaaatgtggctaaatggggatgaggagacacgggtaggactttcttggtgtgtgtgcattctttaaagagccaagttgcttcggggaaacagccaggaaaatggtcaagattatttttagaggttattttattggggattttaagaactaataacatcttgagttatttttaattcagggggatgtggaaaggtttgcaattgtcaagtgttttgttgtagcttagtatccataagggaaacttagactatagacataactacaaagccagtgcagcttttgttttctgtatgttgttgggggatcaactttcacacatagcaagcacatggcctccctgatgtcaggatgcctttgttaggatctgtatttgcccttaattttgttgaaatcttttttccttcttcctcttgaaaagttccaaaatatagtttattgtatctttcatcactaaaaatttgttcctttttcactatgggcagttcacacaaggcaaaaactattgaacagttggttttagtgtgttgtataactttgctgtatatcaaactaattttgacaagttttcatcctaagcctcaaatcatgtaattaataatttgcctgtttatttatgacctaattgtgattcttttattaataaaagctaatgggaaaaggatccctgattaagctgatgactagacctacaattaattttcctgcagtatatgaagtattgtaccagagtattaaaagatatgtaatattttattgataaatctatcctttaaaaggaatacgttttaggatgtcatcattttgatgtgaatcatgtaaatgttgataatatgctgtttattatacatttagtgtttcaagagattcacttaattgcctttttgcccacgtatattatgtagtctatttgcaactgttcttaaaaaaatgacattaaaagaatagtttatgtagagaaacattagtggatgttaattgtctccccacctatatttatgggtgttagcgcaactgctttgctagttgcaaagctgtattatcagagtaaaagtgtatttgtaaactgtatgggaactaaaaattaggaataaaaccattttcttatatgaaaaaaaaaaaaaaaaaaaa

SEQ ID NO: 110 - DNA, 596 bp, Homo sapiens
  ref <308>: DATABASE ACCESSION NUMBER: AI346190
  ref <309>: DATABASE ENTRY DATE: 2001-06-18
actttggattatgtttaattaagaaaagcaaagtgcatacagagatttataactttaaaaacaaaaaaaaaaagtctttttatatgatccaaagaataaactcaaaagtccatgacaaatagaagttctaaacaattgtttacaaatactttaggtataattacagtaaaagtcaagttcatttgaaatcaccaaaaaaaaagtttcaggttggacacggtggctcaccacctgtaatcccagtatttagggattttcttacaataaaaggcatacaggttgattattttaggcatacaggttgattattttaggcatacaggttgattattaaatgacatgattgcccatatataaaattttaaggaatctaaaaacaaaaaaccgctttccaaaactagtgagttagaagcacagaggatgcaacataaatatatgaaaatcgattgtatttctatatagtaacaaaaaacaagtagacactaaaattaaaactactatgttgtttataatcattcgaaaaggtaaatacttagctataaatctcacaaaacatggacagaactcataagctgaaacctacacagtgctgagga

SEQ ID NO: 111 - DNA, 528 bp, Homo sapiens
  ref <308>: DATABASE ACCESSION NUMBER: AI188445
  ref <309>: DATABASE ENTRY DATE: 2001-06-18
ttttttttttttaaaatataaaggaattttatttatgaatgtatagatgtacagcaaataggaaagataatacattaaaagaacatatactataaccaggtagagttttatctcaggaatttaaggatgttttaatattacaaaaacccttattataatcatattaggcaatttaagtgataaaaatttgattgtatcaaaagacaccaattccttttatcaagcttttagcttccaacaaacaagaatagaagatgttatttctgttatcctaacaaagaacatttgtttaaaaccaacaattaacttcatatgtaatgaaaaaatatcaaaaaaacttattacaattttatgaaacacaaaaacaaaatagaaatacctatgattttatatttagaaagagcaaacaggccatctaaaactgttagaacaaagaaaatcaccaaaagatacatattttaaaagttaatagctttctaataatagagattcccatgctgacagcaacatagatataaaacagccaag

SEQ ID NO: 112 - DNA, 2472 bp, Homo sapiens
  ref <308>: DATABASE ACCESSION NUMBER: L38961
  ref <309>: DATABASE ENTRY DATE: 2001-06-18
ctgccagggttgggtgcgccgctgaacggatggctgagggagccccgcggatcgttaggaaagccggccagctgatcgtcgtgtgttgccacccattcatgtcaagatgactaagtttggatttttgcgattgtcctatgagaagcaggacacacttttgaagcttctcattctgtcaatggctgctgtattatccttctccactcgtctgtttgctgtcctgagatttgaaagtgttatccatgagtttgatccgtactttaattatcggactaccaggttcctggctgaggaggggttttataaattccataactggtttgatgaccgagcctggtaccctttgggacgaatcattggaggaacaatttacccaggtttaatgatcacctctgctgcaatctaccatgtactccattttttccacatcaccatcgacattcggaatgtctgtgtgttcctggcccctctcttctcctccttcacctccatcgtcacgtacctccttaccaaagagctcaaggatgcaggggctgggcttcttgctgctgccatgattgctgtagttcctggatatatctcccgatctgtggctggctcctatgataatgaagggattgccatcttttgcatgctactcacctactacatgtggatcaaggcagtaaagactggttccatctgttgggcagctaagtgtgcccttgcttatttctacatggtctcgtcatggggaggttatgtgttcctgatcaacttaattcctctccacgtcctcgtgctgatgctcacaggccgtttctctcaccggatctatgtggcctactgtactgtttactgcctgggtactatactttctaggcagatctcctttgtgggtttccagcctgtcctttcatcagagcacatggcagggtttggggtctttggtctctgccagatccatgcctttgtggattacctgcgcagcaagttgaatccacaacaatttgaagttcttttccggagcgtcatctctctggtaggctttgtccttctcaccgtgggagctctcctcatgctgacaggaaaaatatctccctggacggggcgtttctactcactgctggatccctcttatgctaagaacaacatccccatcattgcttctgtgtctgagcatcagcccacaacctggtcctcatactattttgacctgcagctcctcgtcttcatgtttccagttggcctctattactgctttagcaacctgtctgatgcccggatttttatcatcatgtatggtgtgaccagcatgtacttttcagctgtaatggtgcgtctaatgctagtgttggcacctgttatgagcattctctctggcattggagtctcccaggtgctgtccacatacatgaagaatctggacataagtcgcccagacaagaagagcaagaagcaacaggattccacctaccctattaagattgaagtggcaagtgggatgatactggtcatggctttctttctcatcacctacacctttcattcaacctgggtgaccagtgaggcctactcttctccgtccattgtactatctgcccgtggtggggatggcagtaggatcatatttgatgacttccgagaagcatattattggcttcgtcataatactccagaggatgcgaaggtcatgtcctggtgggattatggctatcagattacagctatggcaaaccgaacaattttagtggacaataacacatggaataatacccatatttctcgagtagggcaggcaatggcgtccacagaggaaaaagcctatgagatcatgagggagctcgatgtcagctatgtgctggtcatttttggaggcctcactgggtattcctctgatgatatcaacaagtttctttggatggtccggattggagggagcacagatacaggcaaacatatcaaggagaatgactattatactccaactggggagttccgtgtggaccgtgaaggttctccagtgctgctcaactgcctcatgtacaagatgtgttactatcgctttggacaggtttacacagaagccaagcgtcctccaggctttgaccgtgtccgaaatgctgagattgggaataaagactttgagcttgatgtcctggaggaaggctataccacagaacattggctggtcaggatatacaaggtaaaggacctggataatcgaggcttgtcaaggacataaatgtcacgtccagctctgatatcttcgcactgagcacatcacatttaggacgttgaagattttttttttttttttttttttaatatgcagtttgtaagaacaaaactggatggcatccgaattgtctggaagttttgtcttgggcatgatgggctgggccaaatgaaatgatttttataattctaaacaggttaccaaatgaaatgtcatggctttactttggtcaattaaaggggggaattttttta

SEQ ID NO: 113 - DNA, 516 bp, Homo sapiens
  ref <308>: DATABASE ACCESSION NUMBER: AI096643
  ref <309>: DATABASE ENTRY DATE: 2001-06-18
ttttttttgagtttgaaaggctctttaatagcaagcgaatggtaattacatggtcggatgaggtcctcactctcaggggagggaggagggagcagaggtggacagggtgcagtataggatttacactgtttgaagcatctaacgaagggcaacagtttttggcaacccaattcacagttttgtaatttacaagagatttctttgaaaggaaataggaaggcaaagaaagcacacataccctaccggcaacacttcttgcctaaaaaaaaaaaaaaacaacaaccaaaaaacaaaaacccaacaactattccttgcttttgcttcttgtgtagatgactaaattttgctctcatgctcaaattaagactggatcacggatagtgaagatctgccctagcattgaagatttacttcctcctcttcagagctgacatttgtactgcgcactactcttatctttatctgcctaggtgtcagaaggggcttagtaaaaaatgaaacttgagaaacaaaaca

SEQ ID NO: 114 - DNA, 2907 bp, Homo sapiens
  ref <308>: DATABASE ACCESSION NUMBER: X94453
  ref <309>: DATABASE ENTRY DATE: 2001-06-18
gcgggacgtggacggaagaaaaaagagagtgagcgagcgccggaatcagcccggcgtggagtgcggacccgcggtagtgccagggggcgaaggcggcggtggtgaggaagatactttggttagtgaccacatcgcagcatgttgagtcaagtttaccgctgtgggttccagcccttcaaccaacatcttctgccctgggtcaagtgtacaaccgtcttcagatctcattgtatccagccttcagtcatcagacatgttcgttcttggagcaacatcccgtttatcactgtacccctcagtcgtacacatggcaagtccttcgcccaccgcagtgagctgaagcatgccaagagaatcgtggtgaagctcggcagtgccgtggtgacccgaggggatgaatgtggcctggccctggggcgcttggcatctattgttgagcaggtatcagtgctgcagaatcagggcagagagatgatgctggtgaccagtggagccgtagcctttggcaaacaaacgttgcgccatgagatccttctgtctcagagcgtgcggcaggccctccactcggggcagaaccagctgaaagaaatggcaattccagtcttagaggcacgagcctgtgcagctgccggacagagtgggctgatggccttgtatgaggctatgtttacccagtacagcatctgtgctgcccagattttggtgaccaatttggatttccatgatgagcagaagcgccggaacctcaatggaacacttcatgaactccttagaatgaacattgtccccattgtcaacacaaatgatgctgttgtccccccagctgagcccaacagtgacctgcagggggtaaatgttattagtgttaaagataatgatagcctggctgcccgactggctgtggaaatgaaaactgatctcttgattgtccttccagatgtagaaggcctttttgacagccccccaggttcagatgatgcaaagcttattgatatattttatcccggagatcagcagtctgtgacatttggacccaagtctagagtgggaaatgggtgcatggaagccaaggtgaaaagcaccctctgggctttgcaaggtggcacttctgttgttattgccaatggaacccacccaaaggtgtctgggcacgtcatcacagacattgtggaggggaagaaagttggtaccttcttttcagaagtaaagcctgcaggccctactgttgagcagcagggagaaatggcgcgatctggaggaaggatgttggccaccttggaacctgagcagagagcagaaattatccatcatctggctgatctgttgacggaccagcgtgatgagatcctgttagccaacaaaaaagacttggaggaggcagaggggagacttgcagctcctctgctgaaacgtttaagcctctccacatccaaattgaacagcctggccatcggtctgcgacagatcgcagcctcctcccaggacagcgtgggacgtgttttgcgccgcacccgaatcgccaaaaacttggaactggaacaagtgactgtcccaattggagttctgctggtgatctttgaatctcgtcctgactgtcctaccccaggtggcagctttgctatcgcaagtggcaatggcttgttactcaaaggagggaaggaggctgcacacagcaaccggattctccacctcctgacccaggaggctctctcaatccatggagtcaaggaggccgtgcaactggtgaataccagagaagaagttgaagatctttgccgcctagacaaaatgatagatctgatcattccacgtggctcttcccagctggtcagagacatccagaaagctgctaaggggattccagtgatggggcacagcgaagggatctgtcacatgtatgtggattccgaggccagtgttgataaggtcaccaggctagtcagagactctaaatgtgaatatccagctgcctgtaatgctttggagactttgttaatccaccgggatctgctcaggacaccattatttgaccagatcattgatatgctgagagtggaacaggtaaaaattcatgcaggccccaaatttgcctcctatctgaccttcagcccctccgaagtgaagtcactccgaactgagtatggggacctggaattatgcattgaagtagtggacaacgttcaggatgccattgaccacatccacaagtatggcagctcccacacggatgtcatcgtcacagaggacgaaaacacagcggagttcttcctgcagcacgtagacagtgcctgtgtgttctggaatgccagcactcgcttttctgatggttaccgctttggactgggagctgaagtgggaatcagtacatcgagaatccacgcccggggaccagtaggacttgagggactgcttactactaagtggctgctgcgagggaaggaccacgtggtctcagatttctcagagcatggaagtttaaaatatcttcatgagaacctccctattcctcagagaaacaccaactgaaaagagccaggaaaacccgggaattttccaaaaggtcttcacgttaaacttgtcttatctcaggagagagcccgctcttgtctcccagttcctggtagggtctgcctgttggaaagtgtacctggatgcttctgggctccgtttggcaatagcaatcttggctgatgtgcacagtctggctcccagctcaccctttttttttaaagtaagaaaatagttgctaccgatagggactttgccaagtccaattatcttctaggattgaaaggtgcattttccccataaaaaaggcgaggaaaacccatggctgctttgtgtcacctcagtgacttacagtcccccttggcatttagttggtactagagccagtatccttaacaa

SEQ ID NO: 115 - DNA, 4026 bp, Homo sapiens
  ref <308>: DATABASE ACCESSION NUMBER: AB018290
  ref <309>: DATABASE ENTRY DATE: 2001-06-18
tgctggccctggcgcggcgggtgaggccctggcggtgctgacttcattcgggaggcggttgctggtgctgatacctgtgtatttggccggggcagtgggactcagcgtgggtttcgtgctcttcggcctcgccctctacctgggctggcgccgggtccgcgacgagaaagaacggagccttcgagcagcgaggcagctactggacgacgaggagcagctcactgcgaaaactctctatatgagtcatcgagagctacctgcctgggtcagcttcccagacgtggaaaaggctgaatggctcaataagattgtggcccaggtctggcccttcctgggccagtatatggagaagcttctggctgaaactgtggctccggctgttaggggatctaacccccatctgcaaacatttacatttacacgagtggaactgggtgaaaagccattgcgcatcattggagtcaaggttcacccaggtcagagaaaagagcagatcctgctggacttgaacatcagctatgtaggtgatgtgcagattgatgtggaagtgaagaaatatttttgcaaagcaggagtcaagggcatgcagctacatggcgttttgcgggtgatactggagccactcattggggaccttcccttcgtgggggctgtgtcaatgttcttcatccgacgcccgaccctagacatcaactggacagggatgaccaacctgctggatatcccaggacttagctcactctctgacaccatgatcatggactccattgctgccttcctcgtgttgcccaaccgattactggtgccccttgtgcctgaccttcaagatgtggctcagttgcgttcccctctgcccaggggcattattcgaattcacctgctggctgctcgagggctgagttccaaggacaaatatgtgaagggcctgattgagggcaagtcagacccatatgcacttgtgcgtttgggtacccagacattctgcagtcgtgtcattgatgaagaactcaacccacagtggggagagacttatgaggtgatggtacacgaggtcccagggcaggagattgaagtggaggtgttcgacaaggatccagataaagatgactttctgggcagaatgaagctggatgtagggaaggtgttacaggctagcgttctggatgattggttccctctacaaggtgggcaaggccaagttcacttgaggctagaatggctgtcacttttgtcagatgcagagaaactggagcaggttctacagtggaattggggagtctcctctcgaccagatcccccgtcagctgccatcttagttgtctacctggatcgggcccaggatcttcctatggtgacctctgaattgtacccaccacagctgaagaaggggaacaaggaacccaaccctatggtacaactgtcaattcaggatgtgactcaggagagcaaggctgtctacagtaccaactgcccagtgtgggaggaagcgttccggttcttcctacaagaccctcaaagccaggagctcgatgtgcaagtgaaggatgattccagggccctgactttaggagcactgacgctgcctctggcccgcctgctgactgccccagaactcatcctggaccagtggttccagctcagcagctctggtccaaactccagactctatatgaaactagtcatgaggatcctgtacttggattcatcagaaatatgcttccccacggtgcctggttgtcctggtgcttgggacgtggacagtgagaatccccagagaggcagcagtgtggatgccccacctcgaccctgtcacacgactcctgatagccagtttgggactgagcatgtgcttcggatccatgtattagaggcccaggacctgattgccaaagaccgtttcttggggggactggtgaagggcaagtcagacccctatgtcaaactaaagttggcaggacgaagcttccggagccatgttgttcgggaagatctcaatccccgctggaatgaggtttttgaggtgatcgtcacatcagttccaggccaagagctagaggttgaagtctttgacaaggacttggacaaggatgattttctgggcaggtgtaaagtgcgtctcaccacagtcttaaacagtggcttccttgatgagtggctgaccctggaggatgtcccatctggccgcctgcacttgcgcctggagcgtctcaccccccgtcccactgctgctgagttagaggaggtgctgcaggtgaatagtttgatccagactcagaagagtgcggagctggctgcggccctgctatccatctatatggagcgggcagaggacctcccgctgcgaaaaggcaccaagcacctcagcccttatgctactctcactgtgggagatagttctcataaaaccaagactatttcgcaaacttcagcccctgtctgggatgagagtgcctcctttctcatcaggaaaccacacactgagagcctagagttgcaggttcggggtgagggcactggcgtgctgggctcattatccctgcccctctcagagctcctcgtggctgaccagctctgcttggaccgctggtttacactcagcagtggtcaggggcaggtgctactgagagcacagctagggatcctggtgtcccagcactcgggagtggaagctcatagccacagctacagccacagctcctcatcgctgagtgaagaaccagagctctcggggggaccccctcacatcacctcctcagccccagagctccggcagcgcctaacacatgttgacagtccccttgaggctccagccgggcctctgggccaggtgaaactgactctgtggtactacagtgaagaacgaaagctggtcagcattgttcatggttgccggtcccttcgacagaatggacgtgatcctcctgatccctatgtgtcactgttgctactgccagacaagaaccgaggcaccaagaggaggacctcacagaagaagaggaccctgagtcctgaatttaatgaacggtttgagtgggaactccccctggatgaggcccagagacgaaagctggatgtctctgtcaagtctaattcctccttcatgtcaagagagcgtgagctgctggggaaggtgcagctggacctagctgagacagacctttcccagggtgtagcccggtggtatgacctgatggacaacaaggacaagggcagctcctaggagctggcgagtcccagcctgactgctctgtcttcctgccttcgtctcgctccatcaccgcctcaatgtgatgagcctaaagctagggtccaagggcagagcctgtgcccttcagccctttcacctaacaggcccatattcgggcctttgcctgaccaaagagaagaaccgtatgttccctttactgcacggcctttatccttctgggcccctggggcggggacctgagctggctgtttcctgctttgcctgcacattgttctcccttcctcccaactcctcagggccttctgtatctgtgcctggccagtggcagcactagcagtggtattagcttatgccaaatacagctttggaaggatctttttttctttaactagatggtcaccttcttccctaccacacatgggtgggaaggtggacaggctaacctctccagctgtgagcctcttagactactgcatgtagcaaatgttcagcagctcaggcccccatgtccagttctgtccccactgtcctcaaccctgtcctgaaaattctactgctttgatggctggggccagtctcttgtcactttggaaactgaggacgcgtggattctactcaagcctccaagtagtggcatatcagtcttggagctcctagctggtgatacggagagggctttggaggacttgggacagcagggccaatttttttgcccaagtgcctaggctgctaactcactgactagaacttaatctggtactttacagttttgcaccaactctgccaagccactggatcttacattaaacatcatactc

SEQ ID NO: 116 - DNA, 602 bp, Homo sapiens
  ref <308>: DATABASE ACCESSION NUMBER: AI681442
  ref <309>: DATABASE ENTRY DATE: 2001-06-18
aactttttttttttttttttgtaatgatttacagatgatggtttttcagtatatattatgcaatagaaccaccatgcacaaattgttaatgctgcaaaatgcacattctacatgggtgtaagtagttttataacaagtactcacatttgcaatttgtaaatattcaaaattttattaaattcttccgaattttttctttcagtgttttgtttgcaattatgaattgtcatttttaaatatttttttttagataagcttgagctgtgccttaccttttgtgtgtaataattatgtactaaataatgcattactatttgtttatcttcaaatatgagactaccatatagctatgccaatttacgtgttccttggagtggtggtggaaaaatacctcttctttcagagtttatgtggatttacatagtatgagtgttttagctatagggtgttttaaactgtgcttaaaataatttgttacatgttttgttactgtgttactttattgaggacagctagtccctttgtgttgttaaacgtttaaagacagttgagaagcttcataactctgttcattgtaaatcttagctttcttgtaatatgta

SEQ ID NO: 117 - DNA, 1410 bp, Homo sapiens
  ref <308>: DATABASE ACCESSION NUMBER: X63526
  ref <309>: DATABASE ENTRY DATE: 2001-06-18
ctttctttgcggaatcaccatggcggctgggaccctgtacacgtatcctgaaaactggagggccttcaaggctctcatcgctgctcagtacagcggggctcaggtccgcgtgctctccgcaccaccccacttccattttggccaaaccaaccgcacccctgaatttctccgcaaatttcctgccggcaaggtcccagcatttgagggtgatgatggattctgtgtgtttgagagcaacgccattgcctactatgtgagcaatgaggagctgcggggaagtactccagaggcagcagcccaggtggtgcagtgggtgagctttgctgattccgatatagtgcccccagccagtacctgggtgttccccaccttgggcatcatgcaccacaacaaacaggccactgagaatgcaaaggaggaagtgaggcgaattctggggctgctggatgcttacttgaagacgaggacttttctggtgggcgaacgagtgacattggctgacatcacagttgtctgcaccctgttgtggctctataagcaggttctagagccttctttccgccaggcctttcccaataccaaccgctggttcctcacctgcattaaccagccccagttccgggctgtcttgggcgaagtgaaactgtgtgagaagatggcccagtttgatgctaaaaagtttgcagagacccaacctaaaaaggacacaccacggaaagagaagggttcacgggaagagaagcagaagccccaggctgagcggaaggaggagaaaaaggcggctgcccctgctcctgaggaggagatggatgaatgtgagcaggcgctggctgctgagcccaaggccaaggaccccttcgctcacctgcccaagagtacctttgtgttggatgaatttaagcgcaagtactccaatgaggacacactctctgtggcactgccatatttctgggagcactttgataaggacggctggtccctgtggtactcagagtatcgcttccctgaagaactcactcagaccttcatgagctgcaatctcatcactggaatgttccagcgactggacaagctgaggaagaatgccttcgccagtgtcatcctttttggaaccaacaatagcagctccatttctggagtctgggtcttccgaggccaggagcttgcctttccgctgagtccagattggcaggtggactacgagtcatacacatggcggaaactggatcctggcagcgaggagacccagacgctggttcgagagtacttttcctgggagggggccttccagcatgtgggcaaagccttcaatcagggcaagatcttcaagtgaacatctcttgccatcacctagctgcctgcacctgcccttcagggagatgggggtcattaaaggaaacctgaacattg

SEQ ID NO: 118 - DNA, 1069 bp, Homo sapiens
  ref <308>: DATABASE ACCESSION NUMBER: M13450
  ref <309>: DATABASE ENTRY DATE: 2001-06-18
gaattcggggcaaaaagcaatcagcaattggacaggaaaagaatggcattgaagcagatttccagcaacaagtgctttgggggattgcagaaagtttttgaacatgacagtgttgaactaaactgcaaaatgaaatttgctgtctacttaccaccaaaggcagaaacaggaaagtgccctgcatgtattggctctccaggtttaacttgcacagagccaaaattttatcatcaaaatctggttatcatcagtctgcttcagaaccatttgtcttgttgtcattgctccagatacagccctcgtgcgtgcaatattaaaggtgaagatgagagctgggactttgcgactggtcgtggattttatgttgatgccactgaagatccttggaaaaccaactacagaatgtactcttatgtcacagaggagcttccccaactcataaatgccaattttccagtggatccccaaaggatgtctatttttggccactccatgggaggtcatggagctctgatctgtgctttgaaaaatcctggaaaatacaaatctgtgtcagcatttgctccaatttgcaaccctgtactctgtccctggggcaaaaaagcctttagtggatatttgggaacagatcaaagtaaatggaaggcttatgatgctacccaccttgtgaaatcctatccaggatctcagctggacatactaattgatcaagggaaagatgaccagtttcttttagatggacagttactccctgataacttcatagctgcctgtacagaaaagaaaatccccgttgtttttcgattgcaagagggttatgatcatagctactacttcattgcaacctttattactgaccacatcagacatcatgctaaatacctgaatgcatgaaaaaactccaaataagagaatctcttcaggattataaaagttgtaaaatgcaactgtattgctgagcaaaaaaaaaaaaaattcaaaacattggattttatagtgctaaaagggctttattctatagttgaatcacctctgaataaagatataaaacctaaaaaaacccgaattc

SEQ ID NO: 119 - DNA, 2211 bp, Homo sapiens
  ref <308>: DATABASE ACCESSION NUMBER: M61831
  ref <309>: DATABASE ENTRY DATE: 2001-06-18
ctgaggcccagcccccttcgcccgtttccatcacgagtgccgccagcatgtctgacaaactgccctacaaagtcgccgacatcggcctggctgcctggggacgcaaggccctggacattgctgagaacgagatgccgggcctgatgcgtatgcgggagcggtactcggcctccaagccactgaagggcgcccgcatcgctggctgcctgcacatgaccgtggagacggccgtcctcattgagaccctcgtcaccctgggtgctgaggtgcagtggtccagctgcaacatcttctccacccagaaccatgcggcggctgccattgccaaggctggcattccggtgtatgcctggaagggcgaaacggacgaggagtacctgtggtgcattgagcagaccctgtacttcaaggacgggcccctcaacatgattctggacgacgggggcgacctcaccaacctcatccacaccaagtacccgcagcttctgccaggcatccgaggcatctctgaggagaccacgactggggtccacaacctctacaagatgatggccaatgggatcctcaaggtgcctgccatcaatgtcaatgactccgtcaccaagagcaagtttgacaacctctatggctgccgggagtccctcatagatggcatcaagcgggccacagatgtgatgattgccggcaaggtagcggtggtagcaggctatggtgatgtgggcaagggctgtgcccaggccctgcggggtttcggagcccgcgtcatcatcaccgagattgaccccatcaacgcactgcaggctgccatggagggctatgaggtgaccaccatggatgaggcctgtcaggagggcaacatctttgtcaccaccacaggctgtattgacatcatccttggccggtaggtgccagatggggggtcccggggagtgagggaggagggcagagttgggacagctttctgtccctgacaatctcccacggtcttgggctgcctgacaggcactttgagcagatgaaggatgatgccattgtgtgtaacattggacactttgacgtggagatcgatgtcaagtggctcaacgagaacgccgtggagaaggtgaacatcaagccgcaggtggaccggtatcggttgaagaatgggcgccgcatcatcctgctggccgagggtcggctggtcaacctgggttgtgccatgggccaccccagcttcgtgatgagtaactccttcaccaaccaggtgatggcgcagatcgagctgtggacccatccagacaagtaccccgttggggttcatttcctgcccaagaagctggatgaggcagtggctgaagcccacctgggcaagctgaatgtgaagttgaccaagctaactgagaagcaagcccagtacctgggcatgtcctgtgatggccccttcaagccggatcactaccgctactgagagccaggtctgcgtttcaccctccagctgctgtccttgcccaggccccacctctcctccctaagagctaatggcaccaactttgtgattggtttgtcagtgtcccccatcgactctctggggctgatcacttagtttttggcctctgctgcagccgtcatactgttccaaatgtggcagcgggaacagagtaccctcttcaagccccggtcatgatggaggtcccagccacagggaaccatgagctcagtggtcttggaacagctcactaagtcagtccttccttagcctggaagtcagtagtggagtcacaaagcccatgtgttttgccatctaggccttcacctggtctgtggacttatacctgtgtgcttggtttacaggtccagtggttcttcagcccatgacagatgagaaggggctatattgaagggcaaagaggaactgttgtttgaattttcctgagagcctggcttagtgctgggccttctcttaaacctcattacaatgaggttagtacttttagtccctgttttacaggggttagaatagactgttaaggggcaactgagaaagaacagagaagtgacagctaggggttgagaggggccagaaaaacatgaatgcaggcagatttcgtgaaatctgccaccactttataaccagatggttcctttcacaaccctgggtcaaaaagagaataatttggcctataatgttaaaagaaagcaggaaggtgggtaaataaaaatcttggtgcctgg

SEQ ID NO: 120 - DNA, 1496 bp, Homo sapiens
  ref <308>: DATABASE ACCESSION NUMBER: M33680
  ref <309>: DATABASE ENTRY DATE: 2001-06-18
ccattgtgctggaaaggcgcgcaacggcggcgacggcggcgaccccaccgcgcatcctgccaggcctccgcgcccagccgcccacgcgcccccgcgccccgcgccccgaccctttcttcgcgcccccgcccctcggcccgccaggcccccttgccggccacccgccaggccccgcgccggcccgcccgccgcccaggaccggcccgcgccccgcaggccgcccgccgcccgcgccgccatgggagtggagggctgcaccaagtgcatcaagtacctgctcttcgtcttcaatttcgtcttctggctggctggaggcgtgatcctgggtgtggccctgtggctccgccatgacccgcagaccaccaacctcctgtatctggagctgggagacaagcccgcgcccaacaccttctatgtaggcatctacatcctcatcgctgtgggcgctgtcatgatgttcgttggcttcctgggctgctacggggccatccaggaatcccagtgcctgctggggacgttcttcacctgcctggtcatcctgtttgcctgtgaggtggccgccggcatctggggctttgtcaacaaggaccagatcgccaaggatgtgaagcagttctatgaccaggccctacagcaggccgtggtggatgatgacgccaacaacgccaaggctgtggtgaagaccttccacgagacgcttgactgctgtggctccagcacactgactgctttgaccacctcagtgctcaagaacaatttgtgtccctcgggcagcaacatcatcagcaacctcttcaaggaggactgccaccagaagatcgatgacctcttctccgggaagctgtacctcatcggcattgctgccatcgtggtcgctgtgatcatgatcttcgagatgatcctgagcatggtgctgtgctgtggcatccggaacagctccgtgtactgaggccccgcagctctggccacagggacctctgcagtgccccctaagtgacccggacacttccgagggggccatcaccgcctgtgtatataacgtttccggtattactctgctacacgtagcctttttacttttggggttttgtttttgttctgaactttcctgttaccttttcagggctgatgtcacatgtaggtggcgtgtatgagtggagacgggcctgggtcttggggactggagggcaggggtccttctgcccctggggtcccagggtgctctgcctgctcagccaggcctctcctgggagccactcgcccagagactcagcttggccaacttggggggctgtgtccacccagcccgcccgtcctgtgggctgcacagctcaccttgttccctcctgccccggttcgagagccgagtctgtgggcactctctgccttcatgcacctgtcctttctaacacgtcgccttcaactgtaatcacaacatcctgactccgtcatttaataaagaaggaacatcaggcatgctaaaaaaaaaaaaaaaa

SEQ ID NO: 121 - DNA, 6478 bp, Homo sapiens
  ref <308>: DATABASE ACCESSION NUMBER: D13639
  ref <309>: DATABASE ENTRY DATE: 2001-06-18
agagcgagcaggggagagcgagaccagttttaaggggaggaccggtgcgagtaaggcagccccgaggctctgctcgcccaccacccaatcctcgcctcccttctgctccaccttctctctctgccctcacctctcccccgaaaaccccctatttagccaaaggaaggaggtcaggggaacgctctcccctccccttccaaaaaacaaaaacagaaaaacccttttccaggccggggaaagcaggagggagaggggccgccgggctggccatggagctgctgtgccacgaggtggacccggtccgcagggccgtgcgggaccgcaacctgctccgagacgaccgcgtcctgcagaacctgctcaccatcgaggagcgctaccttccgcagtgctcctacttcaagtgcgtgcagaaggacatccaaccctacatgcgcagaatggtggccacctggatgctggaggtctgtgaggaacagaagtgcgaagaagaggtcttccctctggccatgaattacctggaccgtttcttggctggggtcccgactccgaagtcccatctgcaactcctgggtgctgtctgcatgttcctggcctccaaactcaaagagaccagcccgctgaccgcggagaagctgtgcatttacaccgacaactccatcaagcctcaggagctgctggagtgggaactggtggtgctggggaagttgaagtggaacctggcagctgtcactcctcatgacttcattgagcacatcttgcgcaagctgccccagcagcgggagaagctgtctctgatccgcaagcatgctcagaccttcattgctctgtgtgccaccgactttaagtttgccatgtacccaccgtcgatgatcgcaactggaagtgtgggagcagccatctgtgggctccagcaggatgaggaagtgagctcgctcacttgtgatgccctgactgagctgctggctaagatcaccaacacagacgtggattgtctcaaagcttgccaggagcagattgaggcggtgctcctcaatagcctgcagcagtaccgtcaggaccaacgtgacggatccaagtcggaggatgaactggaccaagccagcacccctacagacgtgcgggatatcgacctgtgaggatgccagttgggccgaaagagagagacgcgtccataatctggtctcttcttctttctggttgtttttgttctttgtgttttagggtgaaacttaaaaaaaaaattctgcccccacctagatcatatttaaagatcttttagaagtgagagaaaaaggtcctacgaaaacggaataataaaaagcatttggtgcctatttgaagtacagcataagggaatcccttgtatatgcgaacagttattgtttgattatgtaaaagtaatagtaaaatgcttacaggaaaacctgcagagtagttagagaatatgtatgcctgcaatatgggaacaaattagaggagactttttttttcatgttatgagctagcacatacacccccttgtagtataatttcaaggaactgtgtacgccatttatggcatgattagattgcaaagcaatgaactcaagaaggaattgaaataaggagggacatgatggggaaggagtacaaaacaatctctcaacatgattgaaccatttgggatggagaagcacctttgctctcagccacctgttactaagtcaggagtgtagttggatctctacattaatgtcctcttgctgtctacagtagctgctacctaaaaaaagatgttttattttgccagttggacacaggtgattggctcctgggtttcatgttctgtgacatcctgcttcttcttccaaatgcagttcattgcagacaccaccatattgctatctaatggggaaatgtagctatgggccataaccaaaactcacatgaaacggaggcagatggagaccaagggtgggatccagaatggagtcttttctgttattgtatttaaaagggtaatgtggccttggcatttcttcttagaaaaaaactaatttttggtgctgattggcatgtctggttcacagtttagcattgttataaaccattccattcgaaaagcactttgaaaaattgttcccgagcgatagatgggatggtttatgcaagtcatgctgaatactcctcccctcttctcttttgccccctcccttcctgcccccagtctgggttactcttcgcttctggtatctggcgttctttggtacacagttctggtgttcctaccaggactcaagagacaccccttcctgctgacattcccatcacaacattcctcagacaagcctgtaaactaaaatctgttaccatctgatggcacagaaggatcttaattcccatctctatacttctcctttggacatggaaagaaaagttattgctggtgcaaagatagatggctgaacatcagggtgtggcattttgttcccttttccgttttttttttttttattgttgttgttaattttattgcaaagttgtattcagcgtacttgaatttttcttcctctccacttcttagaggcattcagttagcaaagaggttggagcaacaactttttttttttttttttgcacaattgtaattgacaggtaatgaagctatttgttaaaatatttgcctttttaagtaaaaaagaaaaatcagaacagggctatttgaagaattattttatacacagattctgccttgtttcatagtatgagggttgaagacggaaaacaatctaagggtctctcatttttttaattttgttttgttcagtttggtttttttttttttttgcgctgctaagaagctaaagtcatccatccttattcacgttgacagtacctagctgtaatgtttcacagagtgtgctgctattttataaacatttttataatatattattttactgcttaaattccaagtcctgaagtagatggttgagatatgagttcttcgtactggaaaagcccttccgtagtttgttttcttctggtagcatattcatggttgtttttttttttcttttttggttttttggttttttttttttcctctgatcacattcttcaaagacggagtattcttacctcaggtttactggacaaaatcaataactacaaaaggcaatgattcacgcttttgttttcataatacctcacaaccgtacagtttctgcttgggagcccattcgcatgaggaatacagaagcagtgtgagcagggctgactccctctcaggtggaaggcagggcggtctcactcccagggacctttttggtcatggaggccatcgggctcccagttagaccctggtatcctcatcatgatggaaaaaatacattgaaccaagggatcctccctccccttcaaggcagacgttcagtacaaacatttatgcggtaggctcagatgtcgtaatttgcacttaggtaccaggtgtcaggaaacagactaaaaagaattccaccaggctgtttggagatcctcatcttggagctttttcaaaagcggggcttcatctgcaaagggccctttcatcttgaagtttttcccctccgtctttcccctcccctggcatggacaccttgtgtttaggatcatctctgcaggtttcctaggtctgaatctgcgagtagatgaacctgcagcaagcagcgtttatggtgcttccttctccctcctctgtctcaaactgcgcaggcaagcactatgcaagcccaggccctctgctgagcggtactaaacggtcgggttttcaatcacactgaattggcaggataagaaaaataggtcagataagtatgggatgatagttgaagggaggtgaagaggctgcttctctacagaggtgaaattccagatgagtcagtctcttgggaagtgtgtttagaagggttcaggactttgtgagttagcatgaccctaaaattctaggggatttctggtgggacaatgggtggtgaattttgaagttttggagagggaagtggagcagccagcaagtaagctagccagagttttctcaagagccagctttgctcagcacactctcctgggccccaaggagtcccacggaatggggaaagtgggaaccctggagttcttgggaatcttggagcctaaagagaaaccgaggtgcaaattcatttcatggtgactgacccttgagcttaaacagaagcagcaaatgaaagaaccggacaaataaggaagggcacaagcctacccgactctatttacagtctgtaactttccactcttcctgtagtcccgaggcccctgggtccttctagcttttctctttcccatccttggggccttgtgtgatgatgggtgtggggctgccgatgggaaagtcgggggttgttaggcttttctgcctgctcctgcttaaacacaagaaggaatcctggattttgccctctccttagctcttagtctctttggtaggagttttgttccagaggagctctcccccttggatttgaacttgctctttttgttgttgttgttctttctcttctttttcttacctcccactaaaggggttccaaattatcctggtctttttctaccttgttgtgtttctatctcgtctttacttccatctgtttgtttttttctccatcagtgggggccgagttgttcccccagcctgccaaattttgatccttcccctcttttggccaaatcctagggggaagaaatcctagtatgccaaaaatatatgctaagcataattaaactccatgcgggtccataacagccaagaagcctgcaggagaaagccaagggcagttccctccgcagaacaccccatgcgtgctgagaggcgagctccttgaagaaggggctgttcttccaggaggccttattttgaactgcctcaggaccccactggagagcacagcatgccttactactgggtcatccttggtctatgtgctctgtactggaggctctgttctgcctcttatcagccaggtcaggggcacacatggcttaagtgacaaagccagaggagaagacaaccctgacagcatcacgctgcatcccattgctagcaggattggcaactcttcagacggagctgcgcttccctgcagtctagcacctctagggcctctccagactgtgccctgggagctctgggactgaaaggttaagaacataaggcaggatcagatgactctctccaagagggcaggggaattttctctccatgggccacaggggacagggctgggagaagaaatagacttgcaccttatgtcatgtaaataattgattttctagttcaagaagataatattggtagtgtgggaattggaggtaggaaggggaggaagtctgagtaagccagttggcttctaagccaaaaggattcctctttgtttatctctgagacagtccaaccttgagaatagctttaaaagggaaattaatgctgagatgataaagtccccttaagccaacaaaccctctgtagctatagaatgagtgcaggtttctattggtgtggactcagagcaatttacaagagctgttcatgcagccatccatttgtgcaaaatagggtaagaagattcaagaggatatttattacttcctcataccacatggcttttgatgattctggattctaaacaacccagaatggtcatttcaggcacaacgatactacattcgtgtgtgtctgcttttaaacttggctgggctatcagaccctattctcggctcaggttttgagaagccatcagcaaatgtgtacgtgcatgctgtagctgcagcctgcatcccttcgcctgcagcctactttggggaaataaagtgccttactgactgtagccattacagtatccaatgtcttttgacaggtgcctgtccttgaaaaacaaagtttctatttttatttttaattggtttagttcttaactgctggccaactcttacatccccagcaaatcatcgggccattggattttttccattatgttcatcacccttatatcatgtacctcagatctctctctctctcctctctctcagttatatagtttcttgtcttggactttttttttcttttctttttctttttttttttgctttaaaacaagtgtgatgccatatcaagtccatgttattctctcacagtgtactctataagaggtgtgggtgtctgtttggtcaggatgttagaaagtgctgataagtagcatgatcagtgtatgcgaaaaggtttttaggaagtatggcaaaaatgttgtattggctatgatggtgacatgatatagtcagctgccttttaagaggtcttatctgttcagtgttaagtgatttaaaaaaataataacctgttttctgactagtttaaagatggatttgaaaatggttttgaatgcaattaggttatgctatttggacaataaactcaccttgacct

SEQ ID NO: 122 - DNA, 443 bp, Homo sapiens
  ref <308>: DATABASE ACCESSION NUMBER: AI690834
  ref <309>: DATABASE ENTRY DATE: 2001-06-18
aattaagtagacttttattgctcaatcaacttcagtaacatctccaaaaaaatagttttcatctaacaattatgaaacaaatttgaaaggcaggatgattcacaatatagacccagtagaggcttatacttcatataaatgaaaaatatcagttctacaatttaaatgtttactttggattttattatagaagaaaatatcattgtaattataaaagccataaaaattggaactgtattgtgaaattacatcaaggtatcagattttatataaatgaacaataaaattcaatttttatttatttaaacgtagttaaacattggaagacaatctcccccatggggaagaaaaaaaaaaaaaaccttgaataataaagcaacaaaagccacaacacaaaaactaatcagtgtgcaaaaatctgattaaaaaaacaaaacaaaact

SEQ ID NO: 123 - DNA, 1796 bp, Homo sapiens
  ref <308>: DATABASE ACCESSION NUMBER: L13278
  ref <309>: DATABASE ENTRY DATE: 2001-06-18
ctagatcaccatggcgactggacagaagttgatgagagctgttagagtttttgaatttggtgggccagaagtcctgaaattgcgatcagatattgcagtaccgattccaaaagaccatcaggttctaatcaaggtccatgcatgtggtgtcaaccccgtggagacatacattcgctctggtacttatagtagaaaaccactcttaccctatactcctggctcagatgtggctggggtgatagaagctgttggagataatgcatctgctttcaagaaaggtgacagagttttcactagcagcacgatctctgggggttatgcagagtatgctcttgcagcagaccacactgtttacaaactacctgaaaaactggactttaaacaaggagctgccatcggcattccatattttactgcttatcgagctctgatccacagtgcctgtgtgaaagctggagagagtgttctggttcatggggcaagtggaggagttggattagcagcatgccaaattgctagagcttatggcttaaagattttgggcactgctggtactgaggaaggacaaaagattgttttgcaaaatggagcccatgaagtgttcaatcacagagaagtgaattacattgataaaattaagaagtatgttggtgagaaaggaattgatataattattgaaatgttagctaatgtaaatcttagtaaagacttgagtcttctgtcacatggaggacgagtgatagttgttggcagcagaggtactattgaaataaacccacgagacaccatggcaaaggagtcgagtataattggagttactctcttttcctcaaccaaggaggaatttcagcaatatgcagcagcccttcaagctggaatggaaattggctggttgaaacctgtgataggttctcaatatccattggagaaggtggccgaggctcatgaaaatatcattcatggtagtggggctactggaaaaatgattcttctcttatgatgattaattctttcatggatttcctatgtaattagaggtactgtctttcccccagttgtacttaccctatcttttctttaattaacattcgattccatgagcttcttatgtgaaaaaataagatttttctttagagagcagaagcagaagagtaaaatttattgtatagctagcaatatttttttatgccatctgtctcaaatcaaagagtcatcatagtaggaaataacatgttagttgtcatttggcatgagtgtgcattccagtaattcttaattgatatttgattaattccatacctttgattaaaacatgctagttcaaaataagactgctcagtttccaagggttttcaagcctacttacctttataaaggttctctagtctctgattagccatgactgtattggactttgaacattttctgaactaaaaacctctattctaaactaatctcatttggatgtgtaagtcttttgtaaaggcaagaataaataatatccaggacaatttattagttttctcagtattttcccaaatattagaatatttacttcattattggttggctgccaatgaccccatatgttctgtgagaatagtagctttatctttgatataatacatagtctccaaataggtaatacttcgcaattgattagattttcagagtagatttagagttatctgtttttctggtgagggtcaaatatttttgttaattaagctcacaaatttgataaattaagaattatctgcatttgtctggtaacataataatgtgtaataaagtct

SEQ ID NO: 124 - DNA, 3795 bp, Homo sapiens
  ref <308>: DATABASE ACCESSION NUMBER: J03473
  ref <309>: DATABASE ENTRY DATE: 2001-06-18
tgcggctgggtgagcgcacgcgaggcggcgaggcggcagcgtgtttctaggtcgtggcgtcgggcttccggagctttggcggcagctaggggaggatggcggagtcttcggataagctctatcgagtcgagtacgccaagagcgagcgcgcctcttgcaagaaatgcagcgagagcatccccaaggactcgctccggatggccatcatggtgcagtcgcccatgtttgatggaaaagtcccacactggtaccacttctcctgcttctggaaggtgggccactccatccggcaccctgacgttgaggtggatgggttctctgagcttcggtgggatgaccagcagaaagtcaagaagacagcggaagctggaggagtgacaggcaaaggccaggatggaattggtagcaaggcagagaagactctgggtgactttgcagcagagtatgccaagtccaacagaagtacgtgcaaggggtgtatggagaagatagaaaagggccaggtgcgcctgtccaagaagatggtggacccggagaagccacagctaggcatgattgaccgctggtaccatccaggctgctttgtcaagaacagggaggagctgggtttccggcccgagtacagtgcgagtcagctcaagggcttcagcctccttgctacagaggataaagaagccctgaagaagcagctcccaggagtcaagagtgaaggaaagagaaaaggcgataaggtggatggagtggatgaagtggcgaagaagaaatctaaaaaagaaaaagacaaggatagtaagcttgaaaaagccctaaaggctcagaacgacctgatctggaacatcaaggacgagctaaagaaagtgtgttcaactaatgacctgaaggagctactcatcttcaacaagcagcaagtgccttctggggagtcggcgatcttggaccgagtagctgatggcatggtgttcggtgccctccttccctgcgaggaatgctcgggtcagctggtcttcaagagcgatgcctattactgcactggggacgtcactgcctggaccaagtgtatggtcaagacacagacacccaaccggaaggagtgggtaaccccaaaggaattccgagaaatctcttacctcaagaaattgaaggttaaaaagcaggaccgtatattccccccagaaaccagcgcctccgtggcggccacgcctccgccctccacagcctcggctcctgctgctgtgaactcctctgcttcagcagataagccattatccaacatgaagatcctgactctcgggaagctgtcccggaacaaggatgaagtgaaggccatgattgagaaactcggggggaagttaacggggacggccaacaaggcttccctgtgcatcagcaccaaaaaggaggtggaaaagatgaataagaagatggaggaagtaaaggaagccaacatccgagttgtgtctgaggacttcctccaggacgtctccgcctccaccaagagccttcaggagttgttcttagcgcacatcttgtccccttggggggcagaggtgaaggcagagcctgttgaagttgtggccccaagagggaagtcaggggctgcgctctccaaaaaaagcaagggccaggtcaaggaggaaggtatcaacaaatctgaaaagagaatgaaattaactcttaaaggaggagcagctgtggatcctgattctggactggaacactctgcgcatgtcctggagaaaggtgggaaggtcttcagtgccacccttggcctggtggacatcgttaaaggaaccaactcctactacaagctgcagcttctggaggacgacaaggaaaacaggtattggatattcaggtcctggggccgtgtgggtacggtgatcggtagcaacaaactggaacagatgccgtccaaggaggatgccattgagcacttcatgaaattatatgaagaaaaaaccgggaacgcttggcactccaaaaatttcacgaagtatcccaaaaagttctaccccctggagattgactatggccaggatgaagaggcagtgaagaagctgacagtaaatcctggcaccaagtccaagctccccaagccagttcaggacctcatcaagatgatctttgatgtggaaagtatgaagaaagccatggtggagtatgagatcgaccttcagaagatgcccttggggaagctgagcaaaaggcagatccaggccgcatactccatcctcagtgaggtccagcaggcggtgtctcagggcagcagcgactctcagatcctggatctctcaaatcgcttttacaccctgatcccccacgactttgggatgaagaagcctccgctcctgaacaatgcagacagtgtgcaggccaaggtggaaatgcttgacaacctgctggacatcgaggtggcctacagtctgctcaggggagggtctgatgatagcagcaaggatcccatcgatgtcaactatgagaagctcaaaactgacattaaggtggttgacagagattctgaagaagccgagatcatcaggaagtatgttaagaacactcatgcaaccacacacaatgcgtatgacttggaagtcatcgatatctttaagatagagcgtgaaggcgaatgccagcgttacaagccctttaagcagcttcataaccgaagattgctgtggcacgggtccaggaccaccaactttgctgggatcctgtcccagggtcttcggatagccccgcctgaagcgcccgtgacaggctacatgtttggtaaagggatctatttcgctgacatggtctccaagagtgccaactactgccatacgtctcagggagacccaataggcttaatcctgttgggagaagttgcccttggaaacatgtatgaactgaagcacgcttcacatatcagcaagttacccaagggcaagcacagtgtcaaaggtttgggcaaaactacccctgatccttcagctaacattagtctggatggtgtagacgttcctcttgggaccgggatttcatctggtgtgaatgacacctctctactatataacgagtacattgtctatgatattgctcaggtaaatctgaagtatctgctgaaactgaaattcaattttaagacctccctgtggtaattgggagaggtagccgagtcacacccggtggctctggtatgaattcacccgaagcgcttctgcaccaactcacctggccgctaagttgctgatgggtagtacctgtactaaaccacctcagaaaggattttacagaaacgtgttaaaggttttctctaacttctcaagtcccttgttttgtgttgtgtctgtggggaggggttgttttggggttgtttttgttttttcttgccaggtagataaaactgacatagagaaaaggctggagagagattctgttgcatagactagtcctatggaaaaaaccaagcttcgttagaatgtctgccttactggtttccccagggaaggaaaaatacacttccacccttttttctaagtgttcgtctttagttttgattttggaaagatgttaagcatttatttttagttaaaaataaaaactaatttcatactatttagattttcttttttatcttgcacttattgtcccctttttagttttttttgtttgcctcttgtggtgaggggtgtgggaagaccaaaggaaggaacgctaacaatttctcatacttagaaacaaaaagagctttccttctccaggaatactgaacatgggagctcttgaaatatgtagtattaaaagttgcatttg

SEQ ID NO: 125 - DNA, 9078 bp, Homo sapiens
  ref <308>: DATABASE ACCESSION NUMBER: D84294
  ref <309>: DATABASE ENTRY DATE: 2001-06-18
ctgaactagttgccagtgatcttgaaacgtgacagtaaccaagagataaataggtgacaatgacaggaaaattagatgtagtaaaagagagtgtttgagagcagaagctatggcaactaaagactggatttgaatccttcctagcttggtgacatgagcaaattacttgatttaagtgagcattttcccatctgtacagtggagataacgataattgtgcctgctaagaagaattgctgtgaagattagtgaaataatgcatgtaaaacatttggtacagtatgtgacacatagtacaaatagtttgctaggaagattgttattattcttcacttgtgatattgtgaagttttcatacagcaaattggacatcatgagatggattgattaaataaatagatttgaacttcaaggactggtagtgttcttgctttggaaagaagaaacttggtttatcctaataatagtaggataataatggtgaagtgataggtacaagtaatagtgtttatgatgcgctggtgatgataggaaaagaaagccattatatgggcaagagctagaagtaataaaatggtgcatttttcagtgatgtttggcctatgtagctattctctgataactataaaaatccttattattgaagattcttcaggaaaaaaaaacccttagtctgaaactttagcaccaatcccccttgccccccattgaaatacgtatttttaaaacatggcttttgataatgtgagggttttttcctttttgcgatttagcagtgctgattgtgtattgcagtagttgtgagagcattagaagcagcagtcgataggaggatggaaggtctggatgccgccttggggagttaggagattggcagacttaccctgtaccactctagccctactcctttgcccaagacagaaacacactgagatggataggagaatatgagcagttgataggaaagttctcagtggagtcaggatttaggttaggccaggagattgagaatataacagtttgtgtatgatgaaatggcatatttcacagaatgcagtaaaagcaggtagggtacaagtgcagcaacaggaagatgtcttttcttcattcagcaaacacttatttgagagcttaccatgtgctaggcacatacaaagataaataagatgcccttgatgatcctctatttaaaggagacatgtaaacaggttaacttagagtagagatggtgaatatgtgaacctgaggaaaggaagaaatagattaaattatctggagagagaggaaaagtcagcagaatggggacgagaatctttcggagctcagtgttctgataggagttatttccttgggcataggttccaagtatttttctaatataccatagaagccaggaaaactttcttctgttatctcaaatgatttaattactgacttgagtttgtgttgtctccttagacttgtgcaccatggacaattttgctgagggagatttcactgtggcggattatgccttgttagaagattgccctcacgtggatgattgtgtctttgctgctgaatttatgagcaatgattatgttcgtgtgactcagctttactgtgatggggtgggtgtgcaatataaagattatatccaaagtgagaggaatttggaatttgacatctgcagtatatggtgtagtaaaccaatttctgtcctgcaagattattgcgatgccattaaaataaacatcttctggccacttctgtttcaacatcaaaacagttccgtaatatcacgattgcatccctgtgtggacgccaacaattcacgtgcttctgagataaatttgaagaaactacaacatcttgagttgatggaagatattgtggatttggcaaagaaagttgctaatgattcattccttattggaggcttattgagaattggttgtaaaatagaaaataaaatcttggcaatggaagaagctctgaattggataaaatatgcaggcgatgtaacaattctaactaaattaggatcaattgacaattgttggcctatgttaagtattttctttactgaatacaagtaccacataactaaaattgtaatggaagactgcaatttgcttgaagaacttaaaactcaaagttgtatggattgtatagaggaaggagaactaatgaaaatgaaaggaaatgaagagttttccaaagaaagatttgatatagctattatctattacaccagagccattgaatatagacctgaaaactaccttctttatggtaaccgagctctttgttttcttcgtactggacagtttagaaatgcactcggtgatggaaagagagccactattctgaagaacacttggccaaagggtcattatcgttattgtgatgctctttctatgctgggggaatatgactgggccctgcaagcaaacataaaagctcaaaaactctgtaaaaatgaccctgagggaatcaaggatctaattcagcagcatgtaaagttacaaaaacaaatagaagacctacaaggtcgaacagcaaataaggatccaattaaagccttttatgaaaacagggcctacacacctaggagtttatcagcacctatatttactacttcacttaactttgtggagaaggaaagagatttcagaaaaattaatcacgaaatggccaacggtggtaatcagaatctaaaggtggcggatgaggcgttgaaggtagatgattgtgactgtcatcctgaattttcaccaccatcaagtcagcctccaaaacataaaggaaaacaaaaatctcgaaacaatgaatcagaaaagttcagttctagttcaccattgactttaccagcagatttgaagaacatcttggagaaacagttttctaaatcttccagagctgcacaccaggattttgctaatataatgaaaatgctgagaagcttaattcaagatggctatatggccttattggagcagcgttgccgcagcgctgcacaggcctttacagagttgctgaacggtttagatcctcaaaaaataaagcaattgaacctggccatgattaactatgttttggtcgtctatggacttgccatttctctccttggaataggacagcctgaggaattatctgaagccgaaaaccagtttaagaggattattgaacactaccccagtgagggccttgattgcttggcctactgtggaattggaaaagtgtatttgaaaaaaaacagatttctagaagctctcaatcactttgagaaagcaagaaccttgatttatcgtcttcctggagtgttaacttggcccacgagtaatgtgattattgaagagtctcagccacaaaaaataaagatgctgttagagaaatttgttgaagaatgcaagttccctccagtgccagatgccatttgttgctatcagaagtgccatggatattctaagatccagatatacataactgatccagactttaagggttttatacgcatcagctgttgccagtactgtaaaatagaatttcacatgaattgctggaagaagttaaaaactacaacctttaatgataaaattgacaaggattttctacaaggaatatgtcttacccctgactgtgaaggtgtcatttctaagattatcatcttcagcagtggtggtgaagttaaatgtgaatttgaacacaaggtcataaaagaaaaggttcctccaagacctattctgaaacagaaatgttctagcctagagaaactaagactgaaagaagacaaaaaattgaagagaaagatccaaaaaaaagaagcaaaaaagttagcacaagaaagaatggaggaggacttaagagaaagtaatccacccaaaaatgaagagcagaaagaaactgtagacaatgttcagcgttgtcagttccttgatgacagaattctacagtgtataaagcagtatgctgacaagattaaatccggcatacagaatacagccatgcttctcaaagaattgctttcttggaaagttttgagcacagaagactatacaacctgtttttctagcagaaattttctaaatgaagcagtggactatgttattcgccacttgattcaagaaaataacagagtaaagacaagaatatttctgcatgttttgagtgagcttaaagaagtggagcccaaattagccgcctggatccaaaaacttaatagctttggcttagatgccacaggaactttcttttctcgttatggagcatctcttaaactgcttgattttagtatcatgactttcctctggaatgagaaatatggtcacaaactagactctatagaaggaaagcaacttgattatttctctgagccagcatcattgaaggaagcccgttgtttaatatggctgctagaagaacacagagacaagttcccagcattgcatagtgctttagatgaattctttgatataatggacagccgctgtactgtgttaaggaaacaagatagtggtgaagcaccgtttagttcaaccaaggtgaaaaacaaaagcaagaaaaagaagccaaaggattcaaagcctatgttagttgggtctggaacaacttcagtaacttcaaataatgagatcatcacttcaagtgaagaccatagcaatcgaaattcagattctgcaggcccatttgcagtgcctgaccatcttcggcaagatgtagaagaattcgaagctctctatgaccaacacagtaacgaatatgttgtccgcaataagaagctatgggacatgaacccaaaacaaaaatgttcaactctatatgattacttctctcagtttttggaggaacatggtcccttggacatgagtaacaagatgttctctgcagaatatgagtttttcccagaagaaactcgacagatactagaaaaagcaggaggtttaaaaccttttctcttgggatgccctcgttttgttgtgattgacaactgtattgcactgaagaaggttgcatcacggctcaagaaaaaaaggaagaagaaaaacattaaaacaaaagtagaagaaatttcaaaagcaggggagtatgtacgagttaaactacaactgaatccagctgctagggaatttaaaccagatgtaaagtctaaaccagtgtcagattcatcttcagcaccagcttttgaaaatgtgaaacccaaacctgtgtctgcaaattctcccaagccagcttgtgaagatgtgaaggccaaaccagtatccgacaattcttctagacaagtttctgaggatgggcaacccaaaggggtctcttctaattctcctaaaccaggctctgaggatgcaaattacaagcgagtctcctgtaattcccccaaaccggttcttgaggatgtgaaaccaacttattgggctcaatcccatttggtcacaggatactgtacgtatcttcctttccagagatttgatatcacccagacaccgccagcatacataaacgtgttaccaggtttgccccagtacaccagcatatatacacccttggccagcctttctcctgaatatcagctaccaagatcagtaccagtggtgccgtcttttgtagccaatgacagagcagataaaaatgctgctgcctattttgagggtcatcatttgaatgctgagaatgttgctggtcaccagattgcctctgaaacacagatccttgagggctctttgggaatatctgtaaagtcacactgcagcacaggtgatgctcatacagtcctgagtgagtctaacagaaatgatgagcactgtggaaattctaacaacaaatgtgaagtaattccagaaagcaccagtgcagtaacaaacattccacacgtgcagatggttgccatacaggtatcttggaacataatacaccaagaagtcaatactgagccatataatccttttgaggaacgacaaggggaaatttcacggattgaaaaggagcaccaagtattacaagaccaacttcaagaagtgtatgaaaattatgagcagataaaacttaagggcttagaagagaccagggacctggaagagaagttgaaaaggcacttagaagaaaacaagatctcaaagacggaattagattggttccttcaagatttggaaagagaaattaaaaaatggcaacaggaaaaaaaagaaatccaagaaagactaaaatcactgaagaagaaaattaaaaaggtttcaaatgccagtgaaatgtatacccagaaaaatgatggaaaggaaaaggaacatgaattacatctggatcagtcccttgaaatcagcaacacacttacaaatgagaaaatgaaaatagaagagtatataaagaaagggaaagaggattatgaagagagtcatcagagagctgtggctgcagaggtatccgtacttgaaaactggaaggagagtgaagtgtataagctacagatcatggagtcacaagcagaagcctttctgaagaagctggggctgattagccgtgatcctgcagcatatcctgacatggagtctgatatacgttcatgggaattgtttctttctaatgttacaaaagaaattgagaaagcaaagtctcagtttgaagaacaaattaaggcaattaaaaatggttctcggctcagtgaactttctaaagtgcagatttctgagctttcatttcctgcctgtaacacggttcatcccgagttactccctgagtcttcaggccacgatggccaagggcttgtgacttctgcaagcgacgtgactggaaaccacgcagcacttcacagggatcctagtgtgttctctgctggtgattccccaggggaggctccttctgcgctgttgccagggccaccccctggtcagcctgaagccactcagctgacagggccaaaacgggctggccaggcagctctgtcagaacgaagccctgtggctgatcggaagcagcctgttcctccaggacgtgctgcgcgttcaagccagtctccaaaaaagccgttcaatagtattattgagcacctgtcagtggtattcccatgttacaacagcactgagcttgctggttttattaaaaaagtgcgaagcaaaaacaagaactcactctcaggattgagtattgatgaaattgtccaaagagtgacagaacacattctagatgaacagaaaaagaaaaagccaaacccaggaaaggacaagaggacttatgagcccagctctgccacccccgtgaccaggtcctcccagggctcaccctcggtggttgttgcaccatcacccaaaaccaaggggcagaaagcagaagatgtccctgtgaggattgcactgggtgcaagttcctgtgaaatatgccacgaggtgttcaaatcaaaaaacgtgcgtgtgctcaaatgtgggcacaagtatcacaaagggtgctttaagcagtggcttaaagggcagagcgcttgcccggcctgccagggtcgtgatctcctgacagaagagtcaccttctggaagaggctggcccagtcagaatcaggagctgccttcctgctcttctaggtagtcacacttcactaaagtgtcatccaccagtgtgttgaatccgaagaatgacaattttctaccactggtgtaaaaaacaaacatttgaagacccttgtgcattgtgtgtcacaaagctaaatacatggaaatcgttaatatcgctgatattaagtaatttccccactctgagtgaatactttgatgattgccaacagtggctaataaaatgacggctaccacactcatgggtcactggggctgcgcagggctctttgaggtgggtggcttcttttggaaagtactatgaacgtctcgaagcagtattctagtgataagaattcttaacatagccaagcgccccacgtttgttccccacgtttgttccccttttctgtttgaaaaacctgttctggtagctccacaagagagatgatactgactttttaaattttttacaagagtctgtattcctgatatgcctatatttttcctcaaagattctgcattttaaggatgggcataagcaaactatattttaataatttatagttaatgttaaaatattggctgatttagaccaaaagattcaaatctcctctttgtgaaatcccatctgcatttgattttttattattttatgttcccccgttagattgttttaagtgtttgcttttcatcttttatagatgtaatctgattttcaaaaatcattaacactttttaattagtatcgactaagactttttccccctggaatcgaggctgtgtgtccgtcatcccagcccccggttggagcctgctctttgaactccgctgccttccttagcagcttctgtcctcttctgtgagtcagtcagcgagtgcttgggatccgcatccagccgtgctgagcacacaacaggctgtgtgtggaaatggccaccaccattctccttccccaccccaccacaaaaagagaagctgtgtctttagacaaccctgaggtatctgtgttacaatcgttctgtgtttgatatttgtgtaaagtatgcatgcagtcttgtactgtgacctaagaacaaaactgtaactgcattagaaaccatgaaaaaattagatattgttttgtgacttttagacagtggtaaatatagaaccatgaattctggtcacattccatttctctccaacatgaaggatcaaaaaatgtttttcaatgtgttctttgttccactggaaacttagagtcatgagtttatgagctgatttggtcaccttcctctgcctttgttcactgtgagttctgatgtcttagtgacttagttcttagaagctcacgccttagtttgaaacagattctccacggtggtccccaaaacactgtctgcatatccataagaattgagcgctatgggtgttaacgtgcatgaggatcagtttgcagcagcaagtacaaaaggagaagaggaacatccgttgaatgagtgtgttttgtacataacttcagatacttgtgaacatgccttatatttgtccaacaactgtcagaataaagaacattctaaaatgag

SEQ ID NO: 126 - DNA, 1823 bp, Homo sapiens
  ref <308>: DATABASE ACCESSION NUMBER: U50939
  ref <309>: DATABASE ENTRY DATE: 2001-06-18
gaattccgcgcttgtggagctggtggcggcgctccgcaggggctcggctgttttccgcgcggcaggcgcggccatggcgcagctgggaaagctgctcaaggagcagaagtacgaccggcagctgaggttgtggggtgatcatgggcaagaggctttagaatctgctcatgtttgcctaataaatgcaacagccacaggaactgaaattcttaaaaacttggtactaccaggtattggttcgtttacaattattgatggaaatcaggtcagcggagaagatgctggaaacaatttcttccttcaaagaagcagtatcggcaagaaccgagctgaagctgccatggaattcttacaagaattaaatagcgatgtctctggaagttttgtggaagagagtccagaaaaccttctagacaatgatccctcatttttctgtaggtttactgttgtagttgcaactcagcttcctgaaagcacttcactacgcttagcagatgtcctctggaattcccagattcctcttttgatctgtaggacatatggactagttggttatatgaggatcattataaaagaacatccagtaatagaatctcatccagataatgcattagaggatctacgactagataagccatttcctgaactgagagaacattttcagtcctatgatttggatcatatggaaaaaaaggaccacagtcatactccatggattgtgatcatagctaaatatttagcacagtggtatagtgaaacaaatggacgaatacctaaaacgtataaagaaaaagaggacttcagagatttgattagacaaggaattctaaaaaatgaaaatggggctccagaagatgaagagaattttgaagaagctattaaaaatgtgaacacagcactaaatacaactcagatcccaagcagtattgaagatatatttaatgatgatcgctgcataaatatcaccaaacagactccatcattttggattttagctcgtgccttaaaggaatttgtggccaaagagggtcaaggaaatttacctgttcgaggcacaattcctgatatgattgcagattcaggcaaatatataaaactgcaaaacgtttaccgtgaaaaagcaaagaaagatgctgccgctgtgggtaatcatgttgccaaattgctgcagtccattggccaggcaccagagtccatttcagagaaagaattaaaattactctgcagcaattctgcatttcttcgagtggtaagatgtcgatccttagctgaagaatatggtttggatacaattaacaaggatgaaattatttctagcatggacaatccagataatgaaatagtgttgtacttaatgttacgggctgttgatagatttcataaacaacagggtagatatccaggagtatctaactatcaagttgaagaagatataggaaagttgaagtcttgtctcactggcttccttcaggaatatggtttatctgtaatggtgaaagatgattatgtccacgaattttgccgatatggagctgctgagccacataccattgctgcattcttggggggagctgctgctcaagaggtcatcaaaataatcaccaaacaatttgtaatttttaataatacttacatttacagtggcatgtcacaaacttcagcaactttccagttgtagagtaagcaagcaccttaagtagtgtgttaatgattgaaactgtaattgccttcgggttgtgctttagtctgtaaaattctaaaggagagctgctaaattgttttcttaataaacatttttctcatttgtaaaaaaaaaggaattc

SEQ ID NO: 127 - DNA, 1799 bp, Homo sapiens
  ref <308>: DATABASE ACCESSION NUMBER: AF035284
  ref <309>: DATABASE ENTRY DATE: 2001-06-18
gcttgaaccggggaggtggaggttgcagtgagctgagatcacgccattgtactccagcctgggcgacagagcaagactccatttcaaaaaaaaaaaaaaaaaaaaaaatccactcatataaaaggtgagctcagctcactggtccatttctcagtggcttctccatcctcatttgcaaacctcagagggataaggcagttgaacctgatgagcaagaattataacagcaaggaaacattaatgcttagaattctgagatccagcacaactcagtctgtgggagctcagctcgctgcccagggataggtatgacctatgtctgccttaggctgctgggagatgccattctccagtttcagaagcaggcagggcaaaggtcaagactgtggtattggggtcttttggctctgaaggatcctggaaccactgattttggtttattccctccagggtctaaagagaacaagaggtgctagctcttaccaaaacagatggtagagagagttgctggctatttaaaaagctctttcatcttttaattcacctcttcttttcacctctttaaccactcctcaggaacagaacacttctaggactgggggtcttttagctccataagcaagtgagcagatgggacaagttagtcttttctccctagaaacaaaggggatgcccagtggtttccctttgcttcccaacctaaaatttcaagtttaataaaatagcaattagcagaagtgaccaaattgggagataattatcagtcatgaggaaagacacagatttcggtcataaagaatgtaagggctataagtagaaactttctataacctaaatgatgttatagaattatttttgagcaggagcagaaagattaaatatgatcacttcatacttctaaatcagaaataggaagattaaaaccacagaacagtttgtgatttctattgctggtagctaggtatcttactctgtccactcttgttcaagtatctaactcttctggaaaccaaataggctttagaagagattatcctatattcctatcagtataatactaaaatgtaactttttaatcatctggtttttaaaagataaacagtttagcccatctctccagagagcaaacataggaatatgactcaggagcctcctagggcttatcatcagccctcacacccgcttccccctccaacccacagcctttgcttccaggtggcaggattactactttgcctcttcagcagcatctactctaggcatattgatcattttagacactgggagaagagaacctcaaactaggaggaaaagacagagcctccacttagttttgggaggggatggcagacagtcaaggagatgagcgtcctaaggcatgttgggatagggtcagatgcaccacccatggagaggtttgtcaacacaaagacatggaaggttagaggtttgtcaacaaaaagacatggaaggttaggtttgtcaacacaaagacatggaagattagaggtttgtcaacacaaagatacaggaagaatgggctgcagaagatttagatgttttccatttgggcacattttacttagctggagaactaggtttaaaacagcctgggtaggaaaattagaagcaagctggatgcagtggctcatgcctgtaatcccaacacttttgggaggtccaggcaggaggatcacttgggcccaggaggtcaagcctgcagcgagctgagatcacaccactgcactccagcctggggtgatagaacaagaccctgtctcaaaaaaaaaaaaaaaaaa

SEQ ID NO: 128 - DNA, 903 bp, Homo sapiens
  Modified_base 1 ... 903: n = a,c,g, or t
  ref <308>: DATABASE ACCESSION NUMBER: AA843160
  ref <309>: DATABASE ENTRY DATE: 2001-06-18
gaggagcagggccggcgcgaggcgagactcgggagcgtgaggnngcccctgggacggntnnccttcttcgccccggcgccgggcatgtagctggttccccgctcctctgtcgggccagtctgcaggcggagagagtcggacggcgcccggagcgggattctcgccttgtggaggacagcgcgtcggctgcggttctctctcgaccccttctgcccggcgcttcggcccggcgnnctcaggtgcagagcatgaataatctttcatttagtgagctatgttgcctcttctgctgtgcacctttgtcaggggagattgcttcaaaattagcgtttttgccacctgatccaacttacacactgatgtgtgatgaaagccggacgcgttggactttacatctgtctgaacgagcagactggcagtattcttctagagaaaaagatgctattgagtgttcatgactagaaccagtaaaggcaacagaattgcttgtatgtttgtacgttgttcacccaatgcgaaatacactttactcttctcacatggaaatgctgttgatcttggtcaaatgagcagcttttacataggactaggatcacggattaattgtaatatattctcatatgattattctggatatggtgccagttccgggaaaaccacagaggaggaactctattgcgacattgaggctggctggcttgctcttaaggaaaatatgggcttcgccctgaaaaagtggattaaatatggccaagtataggggcagtacccgtctgtggatcttgctgcccatatgagagtgctggcggtaattcttcaatcccctctgactcggggatggcagttgcctttccttgaaaccaggaagactactgttttgattgcattccaaacattgacaaa

SEQ ID NO: 129 - DNA, 3203 bp, Homo sapiens
  ref <308>: DATABASE ACCESSION NUMBER: L13689
  ref <309>: DATABASE ENTRY DATE: 2001-06-18
gagaggcagagatcggggcgagacaatggggatgtgggcgcgggagccccgttccggcttagcagcacctcccagccccgcagaataaaaccgatcgcgccccctccgcgcgcgccctcccccgagtgcggagcgggaggaggcggcggcggccgaggaggaggaggaggaggccccggaggaggaggcgttggaggtcgaggcggaggcggaggaggaggaggccgaggcgccggaggaggccgaggcgccggagcaggaggaggccggccggaggcggcatgagacgagcgtggcggccgcggctgctcggggccgcgctggttgcccattgacagcggcgtctgcagctcgcttcaagatggccgcttggctcgcattcattttctgctgaacgacttttaactttcattgtcttttccgcccgcttcgatcgcctcgcgccggctgctctttccgggattttttatcaagcagaaatgcatcgaacaacgagaatcaagatcactgagctaaatccccacctgatgtgtgtgctttgtggagggtacttcattgatgccacaaccataatagaatgtctacattccttctgtaaaacttgtattgttcgttacctggagaccagcaagtattgtcctatttgtgatgtccaagttcacaagaccagaccactactgaatataaggtcagataaaactctccaagatattgtatacaaattagttccagggcttttcaaaaatgaaatgaagagaagaagggatttttatgcagctcatccttctgctgatgctgccaatggctctaatgaagatagaggagaggttgcagatgaagataagagaattataactgatgatgagataataagcttatccattgaattctttgaccagaacagattggatcggaaagtaaacaaagacaaagagaaatctaaggaggaggtgaatgataaaagatacttacgatgcccagcagcaatgactgtgatgcacttaagaaagtttctcagaagtaaaatggacatacctaatactttccagattgatgtcatgtatgaggaggaacctttaaaggattattatacactaatggatattgcctacatttatacctggagaaggaatggtccacttccattgaaatacagagttcgacctacttgtaaaagaatgaagatcagtcaccagagagatggactgacaaatgctggagaactggaaagtgactctgggagtgacaaggccaacagcccagcaggaggagttccctccacctcttcttgtttgcctagccccagtactccagtgcagtctcctcatccacagtttcctcacatttccagtactatgaatggaaccagcaacagccccagcggtaaccaccaatcttcttttgccaatagacctcgaaaatcatcagtaaatgggtcatcagcaacttcttctggttgatacctgagactgttaaggaaaaaaattttaaacccctgatttatatagatatcttcagccattacgactttctagagctaatacatgtgactatcgtccaatttgctttcttttgtagtgacattaaatttggctataaaagatggactacatgtgatactcctgtccgtcttggttcaaaagaaagattgttgttataaagaattggtttcttggaaagcaggcaagactttttctctgtgttaggaaagatgggaaatggtttctgtaaccattgtttggatttggaagtactctgcagtggacataagcattgggccatagtttgttaatctcaactaacgcctacattacattctccttgatcgttcttgttattacgctgttttgtgaacctgtagaaaaacaagtgctttttatcttgaaattcaaccaacggaaagaatatgcatagaataatgcattctatgatgccatgtcactgtgaataacgatttcttgcagctatttagccattttgattgctgtttgatttatacttctctgttgctacgcaaaaccgatcaaagaaaagtgaacttcagttttacaatctgtatgcctaaaagcgggtactaccgtttattttactgacttgtttaaatgattcgcttttgtaagaatcagatggcattatgcttgttgtacaatgccatattggtatatgacataacaggaaacagtattgtatgatatatctataaatgctataaagaaatattgtgtttcatgcattcagaaatgattgttaaaattctcccaactggttcgacctttgcagatacccataacctatgttgagccttgcttaccagcaaagaatatttttaatgtggatatctaattctaaagtctgttccattagaagcaattggcacatctttctatactttatatacttttctccagtaatacatgtttactttaaaaattgttgcagtgaagaaaaacctttaactgagaaatatggaaaccgtcttaattttccattggctatgatggaattaatattgtattttaaaaatgcatattgatcactataattctaaaacaattttttaaataaaccagcaggttgctaaaagaaggcattttatctaaagttattttaataggtggtatagcagtaattttaaatttaagagttgcttttacagttaacaatggaatatgccttctctgctatgtctgaaaatagaagctatttattatgagcttctacaggtatttttaaatagagcaagcatgttgaatttaaaatatgaataaccccacccaacaattttcagtttattttttgctttggtcgaacttggtgtgtgttcatcagttatttgtgagggtgtttattctatatgaatattgtttcatgtttgtagggaaattgtagctaaacatttcattgtccccagtctgcaaaagaagcacaattctattgctttgtcttgcttatagtcattaaatcattacttttacatatattgctgttacttctgctttctttaaaaatatagtaaaggatgttttatgaagtcacaagatacatatatttttattttgacctaaatttgtacagtcccattgtaagtgttgtttctaattatagatgtaaaatgaaatttcatttgtaattggaaaaaatccaataaaaaggatattcatttagaaaatagctaagatctttaataaaaatttgatatgaaa

SEQ ID NO: 130 - DNA, 3333 bp, Homo sapiens
  ref <308>: DATABASE ACCESSION NUMBER: M34480
  ref <309>: DATABASE ENTRY DATE: 2001-06-18
attcctgcctgggaggttgtggaagaaggaagatggccagagctttgtgtccactgcaagccctctggcttctggagtgggtgctgctgctcttgggagcttgtgctgcccctccagcctgggccttgaacctggacccagtgcagctcaccttctatgcaggccccaatggcagccagtttggattttcactggacttccacaaggacagccatgggagagtggccatcgtggtgggcgccccgcggaccctgggccccagccaggaggagacgggcggcgtgttcctgtgcccctggagggccgagggcggccagtgcccctcgctgctctttgacctccgtgatgagacccgaaatgtaggctcccaaactttacaaaccttcaaggcccgccaaggactgggggcgtcggtcgtcagctggagcgacgtcattgtggcctgcgccccctggcagcactggaacgtcctagaaaagactgaggaggctgagaagacgcccgtaggtagctgctttttggctcagccagagagcggccgccgcgccgagtactccccctgtcgcgggaacaccctgagccgcatttacgtggaaaatgattttagctgggacaagcgttactgtgaagcgggcttcagctcggtggtcactcaggccggagagctggtgcttggggctcctggcggctattatttcttaggtctcctggcccaggctccagttgcggatattttctcgagttaccgcccaggcatccttttgtggcacgtgtcctcccagagcctctcctttgactccagcaacccagagtacttcgacggctactgggggtactcggtggccgtgggcgagttcgacggggatctcaacactacagaatatgtcgtcggtgcccccacttggagctggaccctgggagcggtggaaattttggattcctactaccagaggctgcatcggctgcgcgcagagcagatggcgtcgtattttgggcattcagtcgctgtcactgacgtcaacggggatgggaggcatgatctgctggtgggcgctccactgtatatggacagccgggcagaccgaaaactggccgaagtggggcgtgtgtatttgttcctgcagccgcgaggcccccacgcgctgggtgcccccagcctcctgctgactggcacacagctctatgggcgattcggctctgccatcgcacccctgggcgacctcgaccgggatggctacaatgacattgcagtggctgccccctacgggggtcccagtggccggggccaagtgctggtgttcctgggtcagagtgaggggctgaggtcacgtccctcccaggtcctggacagccccttccccacaggctctgcctttggcttctcccttcgaggtgccgtagacatcgatgacaacggatacccagacctgatcgtgggagcttacggggccaaccaggtggctgtgtacagagctcagccagtggtgaaggcctctgtccagctactggtgcaagattcactgaatcctgctgtgaagagctgtgtcctacctcagaccaagacacccgtgagctgcttcaacatccagatgtgtgttggagccactgggcacaacattcctcagaagctatccctaaatgccgagctgcagctggaccggcagaagccccgccagggccggcgggtgctgctgctgggctctcaacaggcaggcaccaccctggacctggatctgggcggaaagcacagccccatctgccacaccaccatggccttccttcgagatgaggcagacttccgggacaagctgagccccattgtgctcagcctcaatgtgtccctaccgcccacggaggctggaatggcccctgctgtcgtgctgcatggagacacccatgtgcaggagcagacacgaatcgtcctggactgtggggaagatgacgtatgtgtgccccagcttcagctcactgccagcgtgacgggctccccgctcctagttggggcagataatgtcctggagctgcagatggacgcagccaacgagggcgagggggcctatgaagcagagctggcggtgcacctgccccagggcgcccactacatgcgggccctaagcaatgtcgagggctttgagagactcatctgtaatcagaagaaggagaatgagaccagggtggtgctgtgtgagctgggcaaccccatgaagaagaacgcccagataggaatcgcgatgttggtgagcgtggggaatctggaagaggctggggagtctgtgtccttccagctgcagatacggagcaagaacagccagaatccaaacagcaagattgtgctgctggacgtgccggtccgggcagaggcccaagtggagctgcgagggaactcctttccagcctccctggtggtggcagcagaagaaggtgagagggagcagaacagcttggacagctggggacccaaagtggagcacacctatgagctccacaacaatggccctgggactgtgaatggtcttcacctcagcatccaccttccgggacagtcccagccctccgacctgctctacatcctggatatacagccccaggggggccttcagtgcttcccacagcctcctgtcaaccctctcaaggtggactgggggctgcccatccccagcccctcccccattcacccggcccatcacaagcgggatcgcagacagatcttcctgccagagcccgagcagccctcgaggcttcaggatccagttctcgtaagctgcgactcggcgccctgtactgtggtgcagtgtgacctgcaggagatggcgcgcgggcagcgggccatggtcacggtgctggccttcctgtggctgcccagcctctaccagaggcctctggatcagtttgtgctgcagtcgcacgcatggttcaacgtgtcctccctcccctatgcggtgcccccgctcagcctgccccgaggggaagctcaggtgtggacacagctgctccgggccttggaggagagggccattccaatctggtgggtgctggtgggtgtgctgggtggcctgctgctgctcaccatcctggtcctggccatgtggaaggtcggcttcttcaagcggaaccggcacaccctggaagaagatgatgaagagggggagtgatggtgcagcctacactattctagcaggagggttgggcgtgctacctgcaccgccccttctccaacaagttgcctccaagctttgggttggagctgttccattgggtcctcttggtgtcgtttccctcccaacagagctgggctaccccccctcctgctgcctaataaagagactgagccct

SEQ ID NO: 131 - DNA, 546 bp, Homo sapiens
  ref <308>: DATABASE ACCESSION NUMBER: AI283385
  ref <309>: DATABASE ENTRY DATE: 2001-06-18
tttttttttttttttttttttttttttttttttttttttttttttttaaaagaagaaagcctttatttccttggttggcaaaaaaaacgggctaaggggggggcttttgggggattagtcaaagagaccaaatcccatatcctcggccgactcctccgacttttccttggcttcaaccttagctggggctgcagcaacagcaggagcagctgggggggcagcagccacaggggcagcagccacaaaggcagatggatcacccaaaaaggccttgaccttttcagcaagggggaaggggtaatccgtctccacagacaaggccaggactcgtttgtccccgttgatgatagaagggggtactgatgcaacagtggggtagccaatctgcagacagacactggcaacattggggacaccctccaggaagcgagaatgcagagttttctctgtgatatcaagcacttcagggttggagatgcttgctttgtcaaaccacctgttgttagacccaccccaaaggagaggggggagaaggtggcatggtca

SEQ ID NO: 132 - DNA, 2272 bp, Homo sapiens
  ref <308>: DATABASE ACCESSION NUMBER: X63657
  ref <309>: DATABASE ENTRY DATE: 2001-06-18
aggcgcccgcccgccgcgcgtgattctcgcctcgccgcagcccagccctgcgcgccttgcccggcggcccccgcccggccgctccgggcccctggccccgcggagcgatgctgctgctggctgccgccttcctcgtggccttcgtgctgctgctgtacatggtgtctccgctcatcagccccaagcccctcgccctgcccggggcgcatgtggtggttacaggaggttccagtggcatcgggaagtgcattgctatcgagtgctataaacaaggagcttttataactctggttgcacgaaatgaggataagctgctgcaggcaaagaaagaaattgaaatgcactctattaatgacaaacaggtggtgctttgcatatcagttgatgtatctcaagactataaccaagtagagaatgtcataaaacaagcacaggagaaactgggtccagtggacatgctggtaaattgtgcaggaatggcagtgtcaggaaaatttgaagatcttgaagttagtacctttgaaaggttaatgagcatcaattacctgggcagcgtgtaccccagccgggccgtgatcaccaccatgaaggagcgccgggtgggcaggatcgtgtttgtgtcctcccaggcaggacagttgggattattcggtttcacagcctactctgcatccaagtttgccataaggggattggcagaagctttgcagatggaggtgaagccatataatgtctacatcacagttgcttacccaccagacacagacacacctggctttgccgaagaaaacagaacaaagcctttggagactcgacttatttcagagaccacatctgtgtgcaaaccagaacaggtggccaaacaaattgttaaagatgccatacaaggaaatttcaacagttcccttggctcagatgggtacatgctctcggccctgacctgtgggatggctccagtaacttctattactgaggggctccagcaggtggtcaccatgggccttttccgcactattgctttgttttaccttggaagttttgacagcatagttcgtcgctgcatgatgcagagagaaaaatctgaaaatgcagacaaaactgcctaatcttcttaccccttggaagaagactgtttccaaataatttgaacagcttgctgctaaatgggacccaatttttggcctatagacacttatgtattgttttcgaatacgtcagattggaccagtgctcttcaggaatgtggctgcaagcaaggggctagaagttcacctcctgacagtattattaatactatgcaaatatggaataggagaccatttgattttctaggctttgtggtagagaggtgaaggtatgagaattaatagcgtgtgaacaaagtaaagaacaggattccagaatgatcattaaatttgtttctatttattcttttttgcccccctagagattaagtccagaaatgtactttctggcacataaagaaatcttgaggactttgtttaaaccttccataaaaaaacaattttcggtttctcgggttctctctctctgtctctctgtctctctgtctctctgtctctctgtctctctctctctctctctttctttctttgtgtattttattcaagatgagttggacccattgccagtgagtctgaatgtcactgacagccctgtgttgtgctcaggactcactctgctgctggtggaaactcatggcttctctctctctttgatcccataaagctacgagggggacgggagagggcagtgcaatgggaagtaaagagatattttccagtaggaaaagcaatgctttcttgtctttagactcaaatgcttagggaacgtttcatttctcattcatggggaaaggcagcctccttaaatgttttctgaagagcggtaaaatctagaagcttaagaatttacagttccttcaataaccatgatgacctgaagttcacctatcccattttagcatctacttgtttttcccatctcttcctttccaattttgcttatactgctgtaatatttttgtaaaaaaaaaaaaaaaggaaaaaaaagaccagctaaaattttcgacttgactttttaacttaactcatgaattaattaaagcaaatgaaaaaattaaaaagtgtgactttttctcggagcatatatgtagcttttaggaaaggctgatgatggtataaagtttgctcattaagaaaaaaagacaaggctgattttgaagagagttgcttttgaaataaaatgatca

SEQ ID NO: 133 - DNA, 454 bp, Homo sapiens
  Modified_base 1 ... 454: n = a,c,g, or t
  ref <308>: DATABASE ACCESSION NUMBER: AA678185
  ref <309>: DATABASE ENTRY DATE: 2001-06-18
cagattttagtcattccatcttcggaccctttcagataaccaagagcagagttaaaaggatgggcagcatttctgatttctcataatttggttttgtaaatctaggcagtctacattcagaatggaggagtccagagtataagtcaaataacatttttccttattcaggttttctccctaaaaaacaaaaccatttttaattgcacttccattttgtaatggctcataggattgctgtaaggtctcaattactaggggcttccagggcatttctgagaaataaccctgggtccttgtctagacccttatgccagaccccactccaaagagcggtaagaattccttagtgtcatagcccagacctgctgagctgcgaggcttaagtgtccctgatcaccanatgtcctgtgcttcagggtagcgaggctccctcccagaggtagttatacatgag

SEQ ID NO: 134 - DNA, 2699 bp, Homo sapiens
  Modified_base 1 ... 2699: n = a,c,g, or t
  ref <308>: DATABASE ACCESSION NUMBER: X64229
  ref <309>: DATABASE ENTRY DATE: 2001-06-18
ggcccgcggcggccgaaatccgcggttcacagcatgtccgcctcggcccctgctgcggagggggagggaacccccacccagcccgcgtccgagaaagaacccgaaatgcccggtcccagagaggagagcgaggaggaagaggacgaggacgacgaggaggaggaggaggaggaaaaagaaaagagtctcatcgtggaaggcaagagggaaaagaaaaaagtagagaggttgacaatgcaagtctcttccttacagagagagccatttacaattgcacaaggaaaggggcagaaactttgtgaaattgagaggatacatttttttctaagtaagaagaaaaccgatgaacttagaaatctacacaaactgctttacaacaggccaggcactgtgtcctcattaaagaagaatgtgggtcagttcagtggctttccatttgaaaaaggaagtgtccaatataaaaagaaggaagaaatgttgaaaaaatttagaaatgccatgttaaagagcatctgtgaggttcttgatttggagagatcaggtgtaaatagtgaactagtgaagaggatcttgaatttcttaatgcatccaaagccttctggcaaaccattgccgaaatctaaaaaaacttgtagcaaaggcagtaaaaaggaacggaacagttctggaatggcaaggaaggctaagcgaaccaaatgtcctgaaattctgtcagatgaatctagtagtgatgaagatgaaaagaaaaacaaggaagagtcttcagatgatgaagataaagaaagtgaagaggagccaccaaaaaagacagccaaaagagaaaaacctaaacagaaagctacttctaaaagtaaaaaatctgtgaaaagtgccaatgttaagaaagcagatagcagcaccaccaagaagaatcaaaacagttccaaaaaagaaagtgagtctgaggatagttcagatgatgaacctttaattaaaaagttgaagaaaccccctacagatgaagagttaaaggaaacaataaagaaattactggccagtgctaacttggaagaagtcacaatgaaacagatttgcaaaaaggtctatgaaaattatcctacttatgatttaactgaaagaaaagatttcataaaaacaactgtaaaagagctaatttcttgagatagaggacagagaagatgactcgttcccatagatttgaagatctgatttataccattataccagcaaagagaatgtatttccttttctaaatccttgttaagcaacgttagtagaacttactgctgacctttttatcttgagtgttatgtgaatttgagtttgctgttttaaattgcatttctatgccatttttagtttaaaatcttgcatggcattaattgttccttgcttttatagttgtattttgtacattttggatttctttatataaggtcatagattcttgagctgttgtggtttttagtgcacttaatattagcttgcttaaggcatacttttaatcaagtagaacaaaaactattatcaccaggatttatacatacagagattgtagtatttagtatatgaaatattttgaatacacatctctgtcagtgtgaaaattcagcggcagtgtgtccatcatattaaaaatatacaagctacagttgtccagatcactgaattggaacttttctcctgcatgtgtatatatgtcaaattgtcagcatgacaaaagtgacagatgttattttngtatttttaaaaaacaattggttgtatataaagtttttttatttcttttgtgcagatcactttttaaactcacataggtaggtatctttatagttgtagactatggaatgtcagtgttcagccaaacagtatgatggaacagtgaaagtcaattcagtgatggcaacactgaaggaacagttaccctgctttgcctcgaaagtgtcatcaatttgtaattttagtattaactctgtaaaagtgtctgtaggtacgttttatattatataaggacagaccaaaaatcaacctatcaaagcttcaaaaactttgggaaagggtgggattaagtacaagcacatttggcttacagtaaatgaactgatttttattaactgcttttgcccatataaaatgctgatatttactggaaacctagccagcttcacgattatgactaaagtaccagattataatgccagaatataatgtgcaggcaatcgtggatgtctctgacaaagtgtgtctcaaaaataatatacttttacattaaagaaatttaatgtttctctggagttggggctcttggctttcagagtttggttaatcagtgttgattctagatgatcaacataatggaccactcctgaatgagacttaattttgtctttcaaatttactgtcttaaatcagtttattaaatctgaattttaaaacatgctgtttatgacacaatgacacatttgttgcaccaattaagtgttgaaaaatatctttgcatcatagaacagaaatatataaaaatatatgttgaatgttaacaggtattttcacaggtttgtttcttgatagttactcagacactagggaaaggtaaatacaagtgaacaaaataagcaactaaatgagacctaataattggccttcgattttaaatatttgttcttataaaccttgtcaataaaaataaatctaaatca

SEQ ID NO: 135 - DNA, 1947 bp, Homo sapiens
  ref <308>: DATABASE ACCESSION NUMBER: AF037989
  ref <309>: DATABASE ENTRY DATE: 2001-06-18
ggcttactcactatagggctcgagcggccgcccgggcaggtctagaattcagcggccgctgaattctagcggaggcggcggcggcggccgcggccgaggtcgaggcgatcagtgggtgaccgcggctgcgagggactttgtcatccgtcctccaggatctggggagaaagagccccatcccttctctctctgccaccatttcggacaccccgcagggactcgttttgggattcgcactgacttcaaggaaggacgcgaacccttctctgaccccagctcgggcggccacctgtctttgccgcggtgacccttctctcatgaccctgcggtgccttgagccctccgggaatggcggggaagggacgcggagccagtgggggaccgcggggtcggcggaggagccatccccgcaggcggcgcgtctggcgaaggccctgcgggagctcggtcagacaggatggtactggggaagtatgactgttaatgaagccaaagagaaattaaaagaggcaccagaaggaactttcttgattagagatagctcgcattcagactacctactaacaatatctgttaaaacatcagctggaccaactaatcttcgaatcgaataccaagacggaaaattcagattggactctatcatatgtgtcaaatccaagcttaaacaatttgacagtgtggttcatctgatcgactactatgttcagatgtgcaaggataagcggacaggtccagaagccccccggaacggcactgttcacctttatctgaccaaaccgctctacacgtcagcaccatctctgcagcatctctgtaggctcaccattaacaaatgtaccggtgccatctggggactgcctttaccaacaagactaaaagattacttggaagaatataaattccaggtataaatgtttctctttttttaaacatgtctcacatagagtatctccgaatgcagctatgtaaaagagaaccaaaacttgagtgctctggataactatatggaatgctttctaagaacagctgaagctaatctaatttaaatttaacagcttgaagaggtagctaggtgtttaaagttcctccagatacttttacctgagtgatgcttcccttcctaaggctgaccaagacctgttgatccttttagattaaaaataaaatgtcgcatgtaaaggctgaagtcgcgttttatcagaatgccttgccttcttaggttcttttccattatgtcaaaggtccaggctccagtaggagagaaagaactcctcataggaatactgaagaagtgggaaggaaccaagctgacacaggcctcactgcaatttgatatgcctgctgatcagagtctcttgggcattttatattttgcattctgatgtacctaggagttttgttaaacagatgatgtatgtgagtatttatcccattttatgcaattaaccaaatcaaccaaaaaaagtgaccatgaagtcctgtatttgtctttttactacatgtaggaactctcatgtgaatgagtactgtagtaatccattctatgggagccttatttcagaaatatttcaaactggtgcaaatggaaaagactttctcttttcctttaaagctaaagacaagaatatcatgctatacaggtgcaactcaatccccgttaataaaaaccaatgtaggtataggcattctaccctttcaaatagctgtgtcccaacctgttgccattgattttttggaaatggctttagaaatatccaagttgtccttgaattgtctaaccatggacataaacagttgtctcccttctactgtgtagaatactttgacttaattttcttccagatacagggggatacctgcctgtttttcaaagtgtttatttactgctgttactatttgattagaatgtattaaataaaaaaaacctgatttctaaaaaaaaaa

SEQ ID NO: 136 - DNA, 1452 bp, Homo sapiens
  ref <308>: DATABASE ACCESSION NUMBER: M25753
  ref <309>: DATABASE ENTRY DATE: 2001-06-18
ttggtttctgctgggtgtaggtccttggctggtcgggctccggtgttctgcttctccccgctgagctgctgcctggtgaagaggaagccatggcgctccgagtcaccaggaactcgaaaattaatgctgaaaataaggcgaagatcaacatggcaggcgcaaagcgcgttcctacggcccctgctgcaacctccaagcccggactgaggccaagaacagctcttggggacattggtaacaaagtcagtgaacaactgcaggccaaaatgcctatgaagaaggaagcaaaaccttcagctactggaaaagtcattgataaaaaactaccaaaacctcttgaaaaggtacctatgctggtgccagtgccagtgtctgagccagtgccagagccagaacctgagccagaacctgagcctgttaaagaagaaaaactttcgcctgagcctattttggttgatactgcctctccaagcccaatggaaacatctggatgtgcccctgcagaagaagacctgtgtcaggctttctctgatgtaattcttgcagtaaatgatgtggatgcagaagatggagctgatccaaacctttgtagtgaatatgtgaaagatatttatgcttatctgagacaacttgaggaagagcaagcagtcagaccaaaatacctactgggtcgggaagtcactggaaacatgagagccatcctaattgactggctagtacaggttcaaatgaaattcaggttgttgcaggagaccatgtacatgactgtctccattattgatcggttcatgcagaataattgtgtgcccaagaagatgctgcagctggttggtgtcactgccatgtttattgcaagcaaatatgaagaaatgtaccctccagaaattggtgactttgcttttgtgactgacaacacttatactaagcaccaaatcagacagatggaaatgaagattctaagagctttaaactttggtctgggtcggcctctacctttgcacttccttcggagagcatctaagattggagaggttgatgtcgagcaacatactttggccaaatacctgatggaactaactatgttggactatgacatggtgcactttcctccttctcaaattgcagcaggagctttttgcttagcactgaaaattctggataatggtgaatggacaccaactctacaacattacctgtcatatactgaagaatctcttcttccagttatgcagcacctggctaagaatgtagtcatggtaaatcaaggacttacaaagcacatgactgtcaagaacaagtatgccacatcgaagcatgctaagatcagcactctaccacagctgaattctgcactagttcaagatttagccaaggctgtggcaaaggtgtaacttgtaaacttgagttggagtactatactttacaaactaaaattggcacatgtgcatctgt

SEQ ID NO: 137 - DNA, 2726 bp, Homo sapiens
  ref <308>: DATABASE ACCESSION NUMBER: D38553
  ref <309>: DATABASE ENTRY DATE: 2001-06-18
caggagacgccaaggaaagatgggacctcccggcccagcactgccagccacaatgaataactcttcttcagagacgcgaggacacccccacagtgcctcctctccttcagagcgtgtgttcccgatgcccctgcccaggaaggcgcctctcaatattcctggcaccccagtcctcgaagactttcctcagaatgacgatgagaaggagcggctgcagcggaggcgctcgagggtctttgatctgcagttcagcactgactcacctcgcttattggcctccccctccagcaggagtattgacatttcagctactatccccaagtttacaaacacgcagattacggaacattactccacctgtatcaaactgtccactgaaaataaaatcactaccaagaatgcttttggtttgcacttgattgattttatgtcagagattcttaaacagaaagacaccgaaccaaccaactttaaagtggctgcgggtactctggatgccagcaccaagatctatgctgtgcgcgtggatgccgtccatgccgatgtatacagagtccttggggggctgggcaaagatgcaccgtctttggaagaagtagaaggccatgttgctgatggaagtgctactgaaatgggaacaaccaaaaaggctgtaaagccaaagaagaagcacttacacagaactattgagcagaacataaacaacctcaatgtctccgaagcagatcggaagtgtgagattgatcccatgtttcagaagacagcagcctcatttgatgagtgcagcacagcaggggtgtttctgtccactctccactgccaggactacagaagtgaactgctgtttccctctgatgtccagactctctccacgggagaacctctcgagttgccagagttaggttgtgtagaaatgacagatttaaaagcgcccttgcagcagtgtgcagaagatcgccagatctgcccttccctggccgggttccagtttacacagtgggacagtgaaacacataatgagtctgtgtcggccctggtagacaagtttaagaagaatgaccaggtatttgacatcaatgctgaagttgacgagagtgactgtggagacttccccgatgggtccctgggggatgactttgatgccaacgatgaacctgaccacaccgcagttggggatcatgaagagttcaggagctggaaggagccctgccaggttcagagctgccaggaagaaatgatttcccttggggatggagacatcaggaccatgtgcccccttctgtctatgaaacctggagaatattcttatttcagtcctcggaccatgtcgatgtgggctggcccggatcactggcgctttaggcctcgacgcaaacaagatgctccttcccaatcagaaaacaaaaagaagagtacaaaaaaagattttgaaattgactttgaagatgatattgactttgatgtatattttagaaaaacaaaggctgctactattctgaccaagtccactttggagaaccagaattggagagctaccacccttcctacagatttcaactacaatgttgacactctggtccagcttcacctcaaaccaggcaccaggttacttaagatggcccagggccatagggtagagactgagcattatgaagaaattgaagactatgattacaacaaccctaacgacacctccaacttttgccctggattacaggctgctgacagtgatgatgaagatttggatgacttatttgtgggacctgttgggaactctgacctctcaccttatccttgccatccacctaagacagcacaacagaatggtgacactccagaagcccaaggattagacatcacaacatatggggagtcaaacttggtagctgagcctcagaaggtaaataaaattgaaattcactatgccaagactgccaaaaagatggacatgaagaaactgaagcagagcatgtggagtctgctgacagcgctctccggaaaggaggcagatgcagaggcaaaccacagggaagctggaaaagaagcggccctggcagaagtggctgacgagaagatgcttagcgggctcacgaaggacctgcagaggagcctgccccctgtcatggctcagaacctctccatacctctggcttttgcctgtctcctacatttagccaatgaaaagaatctaaaactggaaggaacagaggacctctctgatgttcttgtgaggcaaggagattgagttcactatggagaagtcagcagcaggaggcccatcccttactcagttgccgggacatccccagtctcgggggaagaagatgccatgggcttatacccaggctgtagccaactaccaacgtgcctgtttgtttgttgctctttccttctctccatcatagtctgggtgccagcgccctgaagctccgtgctcaactgattaaactttactgccctatggtgaccatctaggagaggggagggcagagggggtgagggtactattctggattgagaaaacctatatccattctttatatcaatgtatagttttagtctcctaaattgatctgttattttccaaactattctcttgtagaaaattttccagtgggcacttaatggtgcccttgaagaacttcctaatccatgtacataaaatacatcatatgtacacttataaatgtatatagaatgctcaaaaataaaattcttaataatag

SEQ ID NO: 138 - DNA, 527 bp, Homo sapiens
  ref <308>: DATABASE ACCESSION NUMBER: AI022085
  ref <309>: DATABASE ENTRY DATE: 2001-06-18
ttttgtcgtatatacatatatataatattttattttaaaatgtcattgaacatatacatttctttagctttttccaggggacattgcacctaagtttcaaaacacacaaaatagatcccctttactaaacagttttcattttggggttacaaaaaagtcaatgtttcacaatcacaaagcataaaggtacatggttctgaaacaatttccaggcagatttctctcattcactgtactagggtagttttggaaacccagaccatgatccattccttacaaatgatctccaccatgggcctccctgggtctccagaaaaaaaacaaagaaaactgggggcaaaacaggagtaaaataataacctcaggactcaggaaacaaacacaaaatacttgtgggagatcagaaaagtagaggacacaggttctccttcaagtacatcacagtagaaaactacagcacatttacagccttatttggtcactgtctacctggttgctacatgaacaaaacttcacctaagacacag

SEQ ID NO: 139 - DNA, 438 bp, Homo sapiens
  ref <308>: DATABASE ACCESSION NUMBER: AI186910
  ref <309>: DATABASE ENTRY DATE: 2001-06-18
tctaaaagaaatgtacaaactagaattttaatataaagaaatgtggccatgctttaaacctgtggtccccaccctttttgggaccagtttcatggaagacaatttttctgtggatgggggaatggtttcaggatgaactgttccacctcagatcatcaggcattagattctcttgaggaacatggcactctagatccctcacataccagttcaccatatggttcgcacttctatgagaatctaatgctgctgctgatctgacagggggaggaactcagtaatgctccattgctctaacctcctgctgtgtggccaaacggatatcctaatagaaattgatgttactaacaattagcctctagggctttaaaagtcaagatgaaatatcaattcaaattctgtttttagatatcaattcaaattcttttttttacaatg

SEQ ID NO: 140 - DNA, 4866 bp, Homo sapiens
  ref <308>: DATABASE ACCESSION NUMBER: X68060
  ref <309>: DATABASE ENTRY DATE: 2001-06-18
atggccaagtcgggtggctgcggcgcgggagccggcgtgggcggcggcaacggggcactgacctgggtgaacaatgctgcaaaaaaagaagagtcagaaactgccaacaaaaatgattcttcaaagaagttgtctgttgagagagtgtatcagaagaagacacaacttgaacacattcttcttcgtcctgatacatatattgggtcagtggagccattgacgcagttcatgtgggtgtatgatgaagatgtaggaatgaattgcagggaggttacctttgtgccaggtttatacaagatctttgatgaaattttggttaatgctgctgacaataaacagagggataagaacatgacttgtattaaagtttctattgatcctgaatctaacattataagcatttggaataatgggaaaggcattccagtagtagaacacaaggtagagaaagtttatgttcctgctttaatttttggacagcttttaacatccagtaactatgatgatgatgagaaaaaagttacaggtggtcgtaatggttatggtgcaaaactttgtaatattttcagtacaaagtttacagtagaaacagcttgcaaagaatacaaacacagttttaagcagacatggatgaataatatgatgaagacttctgaagccaaaattaaacattttgatggtgaagattacacatgcataacattccaaccagatctgtccaaatttaagatggaaaaacttgacaaggatattgtggccctcatgactagaagggcatatgatttggctggttcgtgtagaggggtcaaggtcatgtttaatggaaagaaattgcctgtaaatggatttcgcagttatgtagatctttatgtgaaagacaaattggatgaaactggggtggccctgaaagttattcatgagcttgcaaatgaaagatgggatgtttgtctcacattgagtgaaaaaggattccagcaaatcagctttgtaaatagtattgcaactacaaaaggtggacggcacgtggattatgtggtagatcaagttgttggtaaactgattgaagtagttaagaaaaagaacaaagctggtgtatcagtgaaaccatttcaagtaaaaaaccatatatgggtttttattaattgccttattgaaaatccaacttttgattctcagactaaggaaaacatgactctgcagcccaaaagttttgggtctaaatgccagctgtcagaaaaattttttaaagcagcctctaattgtggcattgtagaaagtatcctgaactgggtgaaatttaaggctcagactcagctgaataagaagtgttcatcagtaaaatacagtaaaatcaaaggtattcccaaactggatgatgctaatgatgctggtggtaaacattccctggagtgtacactgatattaacagagggagactctgccaaatcactggctgtgtctggattaggtgtgattggacgagacagatacggagtttttccactcaggggcaaaattcttaatgtacgggaagcttctcataaacagatcatggaaaatgctgaaataaataatattattaaaatagttggtctacaatataagaaaagttacgatgatgcagaatctctgaaaaccttacgctatggaaagattatgattatgaccgatcaggatcaagatggttctcacataaaaggcctgcttattaatttcatccatcacaattggccatcacttttgaagcatggttttcttgaagagttcattactcctattgtaaaggcaagcaaaaataagcaggaactttccttctacagtattcctgaatttgacgaatggaaaaaacatatagaaaaccagaaagcctggaaaataaagtactataaaggattgggtactagtacagctaaagaagcaaaggaatattttgctgatatggaaaggcatcgcatcttgtttagatatgctggtcctgaagatgatgctgccattaccttggcatttagtaagaagaagattgatgacagaaaagaatggttaacaaattttatggaagaccggagacagcgtaggctacatggcttaccagagcaatttttatatggtactgcaacaaagcatttgacttataatgatttcatcaacaaggaattgattctcttctcaaactcagacaatgaaagatctataccatctcttgttgatggctttaaacctggccagcggaaagttttatttacctgtttcaagaggaatgataaacgtgaagtaaaagttgcccagttggctggctctgttgctgagatgtcggcttatcatcatggagaacaagcattgatgatgactattgtgaatttggctcagaactttgtgggaagtaacaacattaacttgcttcagcctattggtcagtttggaactcggcttcatggtggcaaagatgctgcaagccctcgttatattttcacaatgttaagcactttagcaaggctactttttcctgctgtggatgacaacctccttaagttcctttatgatgataatcaacgtgtagagcctgagtggtatattcctataattcccatggttttaataaatggtgctgagggcattggtactggatgggcttgtaaactacccaactatgatgctagggaaattgtgaacaatgtcagacgaatgctagatggcctggatcctcatcccatgcttccaaactacaaaaactttaaaggcacgattcaagaacttggtcaaaaccagtatgcagtcagtggtgaaatatttgtagtggacagaaacacagtagaaattacagagcttccagttagaacttggacacaggtatataaagaacaggttttagaacctatgctaaatggaacagataaaacaccagcattaatttctgattataaagaatatcatactgacacaactgtgaaatttgtggtgaaaatgactgaagagaaactagcacaagcagaagctgctggactgcataaagtttttaaacttcaaactactcttacttgtaattccatggtactttttgatcatatgggatgtctgaagaaatatgaaactgtgcaagacattctgaaagaattctttgatttacgattaagttattacggtttacgtaaggagtggcttgtgggaatgttgggagcagaatctacaaagcttaacaatcaagcccgtttcattttagagaagatacaagggaaaattactatagagaataggtcaaagaaagatttgattcaaatgttagtccagagaggttatgaatctgacccagtgaaagcctggaaagaagcacaagaaaaggcagcagaagaggatgaaacacaaaaccagcatgatgatagttcctccgattcaggaactccttcaggcccagattttaattatattttaaatatgtctctgtggtctcttactaaagaaaaagttgaagaactgattaaacagagagatgcaaaagggcgagaggtcaatgatcttaaaagaaaatctccttcagatctttggaaagaggatttagcggcatttgttgaagaactggataaagtggaatctcaagaacgagaagatgttctggctggaatgtctggaaaagcaattaaaggtaaagttggcaaacctaaggtgaagaaactccagttggaagagacaatgccctcaccttatggcagaagaataattcctgaaattacagctatgaaggcagatgccagcaaaaagttgctgaagaagaagaagggtgatcttgatactgcagcagtaaaagtggaatttgatgaagaattcagtggagcaccagtagaaggtgcaggagaagaggcattgactccatcagttcctataaataaaggtcccaaacctaagagggagaagaaggagcctggtaccagagtgagaaaaacacctacatcatctggtaaacctagtgcaaagaaagtgaagaaacggaatccttggtcagatgatgaatccaagtcagaaagtgatttggaagaaacagaacctgtggttattccaagagattctttgcttaggagagcagcagccgaaagacctaaatacacatttgatttctcagaagaagaggatgatgatgctgatgatgatgatgatgacaataatgatttagaggaattgaaagttaaagcatctcccataacaaatgatggggaagatgaatttgttccttcagatgggttagataaagatgaatatacattttcaccaggcaaatcaaaagccactccagaaaaatctttgcatgacaaaaaaagtcaggattttggaaatctcttctcatttccttcatattctcagaagtcagaagatgattcagctaaatttgacagtaatgaagaagattctgcttctgttttttcaccatcatttggtctgaaacagacagataaagttccaagtaaaacggtagctgctaaaaagggaaaaccgtcttcagatacagtccctaagcccaagagagccccaaaacagaagaaagtagtagaggctgtaaactctgactcggattcagaatttggcattccaaagaagactacaacaccaaaaggtaaaggccgaggggcaaagaaaaggaaagcatctggctctgaaaatgaaggcgattataaccctggcaggaaaacatccaaaacaacaagcaagaaaccgaagaagacatcttttgatcaggattcagatgtggacatcttcccctcagacttccctactgagccaccttctctgccacgaaccggtcgggctaggaaagaagtaaaatattttacagagtctgatgaagaagaagatgatgttgattttgcaatgtttaattaa

SEQ ID NO: 141 - DNA, 3186 bp, Homo sapiens
  ref <308>: DATABASE ACCESSION NUMBER: X70394
  ref <309>: DATABASE ENTRY DATE: 2001-06-18
agttaatatgatcctctgttgaagcaagaagacaaactgtatggtggagaaagaagtgggaaggatctgcgcggaagaagcctgagaagatgatgcacagatagagaggcaccaggacttgagaggcaccaggacttgggaggcatgttgatccatctccaggaaagactgagaaaaagagcgttgaatataagaaaaaatacttcctctgttctcagatcgtatttgttttaaggccacacctttttgaagttttcagtttgaaacacaacctggactgaaatcatgagggaggttgtgtaggaaagaatcatcaagggacttagttgggagcttctctaccacagcttactccttatggtattaaccccctttaagtgtaaatgtctttggtttaaaacgtttgtacctcatctgttaccagagtgttcatactggagagaaaccctatgaatttactgaatgtgggggaactgttactcatatgttgcatttcgtcgaacgtgcaagtcatgctgaagagaaaccctgtgcttctaaggagtattgacaagcccttagctagatgacaatctcattgagaagcagaaaattcatgctggagagaaactagtgaaggtagcaatacttcattgaatattagaaaatttttctagagagaaagcattgaatatactgagtatgataacatttcctctcaaaccttatcccttactctgcatttgggagatcatacacagagaagccttataaatgtaagagatgtggaaatatcttcagccaaaagtaaatcctcactcatcaagaaatttttactggagagaaaccttgtgaatgtgggaaagcttccattcagatgtcacacctcagccagcagaaaatttacagtggggaaaacccctttgcctgtaaggtatgtggaaaagtcttcagccacaaatcaaacctcactgagcatgagcattttcacacgagagagaaaccttttgaatgtaacgagtgtggaaaagcctttagccaaaagcagtatgtcattaaacatcagaacacccatactggcgagaagcttttcgaatgtaatgaatgtggaaaatcatttagccagaaggaaaacctccttacgcaccagaaaattcacactggagaaaaaccttttgagtgtaaagattgcgggaaagctttcattcagaagtcaaacctcatcagacaccagagaactcacacaggagagaagccctttgtatgtaaggagtgtggaaaaaccttcagtggcaaatccaaccttactgagcatgagaaaatccatattggagagaagccttttaaatgtagtgaatgtggaacagcctttggccagaagaagtacctcataaaacatcagaacattcacactggagagaaaccctatgaatgtaacgaatgtggaaaagccttctctcagcgaacatcacttattgtacatgtgaggattcattcaggtgataaaccttacgaatgcaatgtttgtggaaaagccttctctcagagctcatctctcactgtgcatgtgagaagccatacaggggagaagccctatggttgtaatgaatgtgggaaagctttctctcagttctcaacccttgctctgcatttgagaatacacacaggtaagaagccttatcagtgcagtgaatgtgggaaagctttcagccagaagtcacaccacattagacaccagaaaattcatactcactaaaaaccccatgaaagccttgaaagtgggaaagctttcattagaaatttgcacctcatcatgccccagaaataatccttctgaagcaaagcaccacgaatgaggttaactttaacaagtactaaaaacttaagggacaccagaaaatttgtactgaagagaaagacatgcatatgattaaaaccctgtgtccaacagagaaacctgcagcagagataatggtgaaagtttaggcacattttcactaaaagtgggaacagaaaatggaggcctgttttttattgctaccaccatagatctggagatcttcgccagtaacaagaaaaattaagttgtaaatattggaaaggaacagacaaaaatagatgacatggtcatctacaactaatattaagactcctgtggtattgattgagcagagcagaagagatttcaaaaaaagacctatgcatttattagaatttggaatatgatacaagtggcatcaggaaatgaggaaataatggaactattttttttaagtggaggtagtttgttctccaagggggaaaaatagaccatgaactatacacaaaagtgaatccagagattaaaaacagaaatatggaaaagctatgtactaaaatgcatatgaccttgggaatagggaaacattccttggaacaatttgagaaatacttagcggttctacttatgagtatgaatgctcaggaaatacgcactaggatatttactgtggcttgatttgtagtagccaaaaattagaaacaactgagaaagcccatcacgaacaatatgggaaattcttatgtaatactatatatctgtaaaatgcaacaaatgaaatccacatgtattaacagaaagatcccagaattgttgaggggggatcaagttgcagaatgatacagatagtacaatgacttttttgtaaatttgaattaaaagtttcctcataaaactcagtactatctattggtaatggatgcatatatgtatgtacatgtacatgtttttgaaacggattggaaggatacagaccaaactcttgatagtggtcacctgtgaagagtggagaagggaaaataatgagtgtgggaggtgggatgggtattggttaaaggggacttcagctttttatataaacatccacttctctttcaaaagacttcaagtaaatataagaagatactgattgattctggattgtggtatagggatatcttgtcttattttttgtacttttctgtatttttaaaatttctcaaaataggaatgggagtgaggatgggaatgctgtatctgtggaagtcatgttatactggattcatttccaattaaatactaaacattttatagaaaatatttctaaaattttatcacggatgaatggatggacttgctctctatgtaatatgaaattaatctattttattaaaatttaaaaggacagc

SEQ ID NO: 142 - DNA, 736 bp, Homo sapiens
  Modified_base 1 ... 736: n = a,c,g, or t
  ref <308>: DATABASE ACCESSION NUMBER: AI634838
  ref <309>: DATABASE ENTRY DATE: 2001-06-18
gcagcgtggatttattttatttcattttttactctcaagagaaagaagagttactactgcaggaacagacatttttttaaaaagcgaaactcctgacacccttaaaacagaaaacattgttattcacataataatgtggggctctgtctctgccgacaggggctgggttcgtgcattagctgtgccgtcgacaatagccccattcaccccattcataaatgctgctgctacaggaagggaacagcggctctcccagagagggatccacctggaacacgagtcacctccaaagagctgcaactgtttgagaatctgccaagaggaaaaccactcaatgggacctggataacccaggcccgggagtcatagcaggatgtggtacttcagggccctgggcaccctgttgatcacgagcctcccgtcatagctcagggaggcaaacagccacgggtcagccgaggaccagtccacggcatagacgctgtcctcgtgctcctcgtaggtggcgatcacgttgtcctgcaggggctccttgctcttctcttcagaacggtggtcctcctggtcactgatgtcatcgtcgtctaccaagtggccgaangggctcgacgagatggacaccatgtngganaggatgactctgctgcactgcctgccgtgagaccagctgtcaatgagagtggtgtggcgacgtccaccaccagnntgagtgctccttcaggtctntnacggggtc

SEQ ID NO: 143 - DNA, 3118 bp, Homo sapiens
  ref <308>: DATABASE ACCESSION NUMBER: S78187
  ref <309>: DATABASE ENTRY DATE: 2001-06-18
ggggggggggggggggggagaggcttccctggctggtgcctgagcccggcgtccctcgccccccgccctccccgcatccctctcctccctcgcgcctggccctgtggctcttcctccctccctccttccccccccccccacccctcgcccgctgcctccctcggcccagccagctgtgccggcgtttgttggctgccctgcgcccggccctccagccagccttctgccggccccgccgcgatggaggtgccccagccggagcccgcgccaggctcggctctcagtccagcaggcgtgtgcggtggcgcccagcgtccgggccacctcccgggcctcctgctgggatctcatggcctcctggggtccccggtgcgggcggccgcttcctcgccggtcaccaccctcacccagaccatgcacgacctcgccgggctcggcagccgcagccgcctgacgcacctatccctgtctcgacgggcatccgaatcctccctgtcgtctgaatcctccgaatcttctgatgcaggtctctgcatggattcccccagccctatggacccccacatggcggagcagacgtttgaacaggccatccaggcagccagccggatcattcgaaacgagcagtttgccatcagacgcttccagtctatgccggtgaggctgctgggccacagccccgtgcttcggaacatcaccaactcccaggcgcccgacggccggaggaagagcgaggcgggcagtggagctgccagcagctctggggaagacaaggagaatgatggatttgtcttcaagatgccatggaagcccacacatcccagctccacccatgctctggcagagtgggccagccgcagggaagcctttgcccagagacccagctcggcccccgacctgatgtgtctcagtcctgaccggaagatggaagtggaggagctcagccccctggccctaggtcgcttctctctgacccctgcagagggggatactgaggaagatgatggatttgtggacatcctagagagtgacttaaaggatgatgatgcagttcccccaggcatggagagtctcattagtgccccactggtcaagaccttggaaaaggaagaggaaaaggacctcgtcatgtacagcaagtgccagcggctcttccgctctccgtccatgccctgcagcgtgatccggcccatcctcaagaggctggagcggccccaggacagggacacgcccgtgcagaataagcggaggcggagcgtgacccctcctgaggagcagcaggaggctgaggaacctaaagcccgcgtcctccgctcaaaatcactgtgtcacgatgagatcgagaacctcctggacagtgaccaccgagagctgattggagattactctaaggccttcctcctacagacagtagacggaaagcaccaagacctcaagtacatctcaccagaaacgatggtggccctattgacgggcaagttcagcaacatcgtggataagtttgtgattgtagactgcagatacccctatgaatatgaaggcgggcacatcaagactgcggtgaacttgcccctggaacgcgacgccgagagcttcctactgaagagccccatcgcgccctgtagcctggacaagagagtcatcctcattttccactgtgaattctcatctgagcgtgggccccgcatgtgccgtttcatcagggaacgagaccgtgctgtcaacgactaccccagcctctactaccctgagatgtatatcctgaaaggcggctacaaggagttcttccctcagcacccgaacttctgtgaaccccaggactaccggcccatgaaccacgaggccttcaaggatgagctaaagaccttccgcctcaagactcgcagctgggctggggagcggagccggcgggagctctgtgaccggctgcaggaccagtgaggggcctgcgccagtcctgctacctcccttgcctttcgaggcctgaagccagctgccctatgggcctgccgggctgagggcctgctggaggcctcaggtgctgtccatgggaaagatggtgtggtgtcctgcctgtctgccccagcccagattcccctgtgtcatcccatcattttccatatcctggtgccccccacccctggaagagcccagtctgttgagttagttaagttgggttaataccagcttaaaggcagtattttgtgtcctccaggagcttcttgtttccttgttagggttaacccttcatcttcctgtgtcctgaaacgctcctttgtgtgtgtgtcagctgaggctggggagagccgtggtccctgaggatgggtcagagctaaactccttcctggcctgagagtcagctctctgccctgtgtacttcccgggccagggctgcccctaatctctgtaggaaccgtggtatgtctgccatgttgcccctttctcttttcccctttcctgtcccaccatacgagcacctccagcctgaacagaagctcttactctttcctatttcagtgttacctgtgtgcttggtctgtttgactttacgcccatctcaggacacttccgtagactgtttaggttcccctgtcaaatatcagttacccactcggtcccagttttgttgccccagaaagggatgttattatccttgggggctcccagggcaagggttaaggcctgaatcatgagcctgctggaagcccagcccctactgctgtgaaccctggggcctgactgctcagaacttgctgctgtcttgttgcggatggatggaaggttggatggatgggtggatggccgtggatggccgtggatgcgcagtgccttgcatacccaaaccaggtgggagcgttttgttgagcatgacacctgcagcaggaatatatgtgtgcctatttgtgtggacaaaaatatttacacttagggtttggagctattcaagaggaaatgtcacagaagcagctaaaccaaggactgagcaccctctggattctgaatctcaagatgggggcagggctgtgcttgaaggccctgctgagtcatctgttagggccttggttcaataaagcactgagcaagttgagaaaaaaaaaaaaaaaaaaaaaaaaaaaaa

SEQ ID NO: 144 - DNA, 595 bp, Homo sapiens
  Modified_base 1 ... 595: n = a,c,g, or t
  ref <308>: DATABASE ACCESSION NUMBER: AI654133
  ref <309>: DATABASE ENTRY DATE: 2001-06-18
atcagattaacatgtttattgtagatttttcatacacattttatgtacctattattacaaaaaagcttataatctgatggtagtagactgattgcttacttgaaaatattaacttcatacatatcaaaatacaccatcctcaactatataattggactgcaaaatgcttgatatgaagtatgtaaaaaaataagcagtttattataccttacaaccttataaagggttgctatctagtacaaagataacatttatcttataacaaaaatttgatagttttaaaggttagtattgtgtagggtattttccaaaagactaaagagataactcaggtaaaaagttagaaatgtataaaacaccatcagacaggtttttaaaaaacaacatattacaaaattagacaatcatccttaaaaaaaaaaacttattgtatcaatttcttttgttcaaaatgactgacttaagtatttttaaatatttcagaaacacttcctcaaaaattttcaagatggtagctntcagatgttccctcagtcccaatgttgctcagataaataaatctcgtgagaacttaccacccaccacaagctntctg

SEQ ID NO: 145 - DNA, 2480 bp, Homo sapiens
  ref <308>: DATABASE ACCESSION NUMBER: J02940
  ref <309>: DATABASE ENTRY DATE: 2001-06-18
gacgctctgtgccttcggaggtctttctgcctgcctgtcctcatgcctctcctcctcttgctgctcctgctgccaagccccttacacccccaccccatctgtgaggtctccaaagtggccagccacctagaagtgaactgtgacaagaggaatctgacagcgctgcctccagacctgccgaaagacacaaccatcctccacctgagtgagaacctcctgtacaccttctccctggcaaccctgatgccttacactcgcctcactcagctgaacctagataggtgcgagctcaccaagctccaggtcgatgggacgctgccagtgctggggaccctggatctatcccacaatcagctgcaaagcctgcccttgctagggcagacactgcctgctctcaccgtcctggacgtctccttcaaccggctgacctcgctgcctcttggtgccctgcgtggtcttggcgaactccaagagctctacctgaaaggcaatgagctgaagaccctgcccccagggctcctgacgcccacacccaagctggagaagctcagtctggctaacaacaacttgactgagctccccgctgggctcctgaatgggctggagaatctcgacacccttctcctccaagagaactcgctgtatacaataccaaagggcttttttgggtcccacctcctgccttttgcttttctccacgggaacccctggttatgcaactgtgagatcctctattttcgtcgctggctgcaggacaatgctgaaaatgtctacgtatggaagcaaggtgtggacgtcaaggccatgacctctaacgtggccagtgtgcagtgtgacaattcagacaagtttcccgtctacaaatacccaggaaaggggtgccccacccttggtgatgaaggtgacacagacctatatgattactacccagaagaggacactgagggcgataaggtgcgtgccacaaggactgtggtcaagttccccaccaaagcccatacaaccccctggggtctattctactcatggtccactgcttctctagacagccaaatgccctcctccttgcatccaacacaagaatccactaaggagcagaccacattcccacctagatggaccccaaatttcacacttcacatggaatccatcacattctccaaaactccaaaatccactactgaaccaaccccaagcccgaccacctcagagcccgtcccggagcccgccccaaacatgaccaccctggagcccactccaagcccgaccaccccagagcccacctcagagcccgcccccagcccgaccaccccggagcccaccccaatcccgaccatcgccacaagcccgaccatcctggtgtctgccacaagcctgatcactccaaaaagcacatttttaactaccacaaaacccgtatcactcttagaatccaccaaaaaaaccatccctgaacttgatcagccaccaaagctccgtggggtgctccaagggcatttggagagctccagaaatgacccttttctccaccccgacttttgctgcctcctccccctgggcttctatgtcttgggtctcttctggctgctctttgcctctgtggtcctcatcctgctgctgagctgggttgggcatgtgaaaccacaggccctggactctggccaaggtgctgctctgaccacagccacacaaaccacacacctggagctgcagaggggacggcaagtgacagtgccccgggcctggctgctcttccttcgaggttcgcttcccactttccgctccagcctcttcctgtgggtacggcctaatggccgtgtggggcctctagtggcaggaaggaggccctcagctctgagtcagggtcgtggtcaggacctgctgagcacagtgagcattaggtactctggccacagcctctgagggtgggaggtttggggaccttgagagaagagcctgtgggctctcctattggaatctagttgggggttggaggggtaaggaacacagggtgataggggaggggtcttagttcctttttctgtatcagaagccctgtcttcacaacacaggcacacaatttcagtcccagccaaagcagaaggggtaatgacatggacttggcggggggacaagacaaagctcccgatgctgcatggggcgctgccagatctcacggtgaaccattttggcagaatacagcatggttcccacatgcatttatgcacagaagaaaatctggaaagtgatttatcaggatgtgagcactcgttgtgtctggatgttacaaatatgggtggttttattttctttttccctgtttagcattttctagttttcttatcaggatgtgagcactcgttgtgtctggatgttacaaatatgggtggttttattttctttttccctgtttagcattttctagttttccactattattgtatattatctgtataataaaaaataattttagggttggg

SEQ ID NO: 146 - DNA, 448 bp, Homo sapiens
  ref <308>: DATABASE ACCESSION NUMBER: AI671161
  ref <309>: DATABASE ENTRY DATE: 2001-06-18
gtgatattaattactttttacttttgttaactgcaacctgtttatgtattgttctttaatttttttgtcattgttaaatatttactgttggatttgtttatttattttgagagagatgtcggctgtgagcgttggactaaggtcgacctgatggacctcacctctcgccttgccatgtctaaggtcgaccagatctctctcgccagcagcagtacaattcaggttgagcagagggatgggatcgtgattcactgtggccttgatcttcctggtctcgcccgggcggtcttcccaactggcctcccgtgtcccttggactactcagaccttcttcctctcttttttcctaattccactttctgtttgtttccatagtacttggagagacttgctattcttttttttctttgttcttttctctctctcttttcctatgcttcttcctgca

SEQ ID NO: 147 - DNA, 448 bp, Homo sapiens
  Modified_base 1 ... 448: n = a,c,g, or t
  ref <308>: DATABASE ACCESSION NUMBER: R55307
  ref <309>: DATABASE ENTRY DATE: 2001-06-18
tcagggtttcagatntctttaatgtcatcttgaatttatatgaattacaataaaccttgaaattaacaggataacaaaattagattcctagatcatagatagtctagttcagtttgtaacggctgggatgggatctgggagtacgtatgttcacaaaagccccaagtgattttgaagcagctggtctttggacaagtnttgcgagtgacttctccaccaagagtttttcagggttttacctaaggcagtacctatttaaagaccagcggttactgtgttgccatattttccaccttcttgatacttctaagtactgggaagaaaggttagagtcaatttttttaattcacctttttatgttaaagtaggaaaattccctcttgatttccgaaaaactatttttaggggagaaaggctgtccagtgtggctacaatttgtctacacggt

SEQ ID NO: 148 - DNA, 597 bp, Homo sapiens
  Modified_base 1 ... 597: n = a,c,g, or t
  ref <308>: DATABASE ACCESSION NUMBER: AA121546
  ref <309>: DATABASE ENTRY DATE: 2001-06-18
acctttaagtgtaaaaatgtgtttattcacaaccatttgtaaattaccatttgttaccattccttcaaaaaattctttatgaacaaaaagccaagaaaaattacaatcgtagcttatgccaaaccaaaaatatacatctgatgtatacaaactttaaaaagcattaacacaggcaatgtgaatatagattaccttaaaaatatttccaagacacagctacaacttaaattatgttaagacagatataaataatagcattacctaatgtattatatttacatatttaaagtatcatattaatttctatgacataaaaaaggagataaaactacagatgtcattgcttagcagttcaaatattgaaagggccacatgatttttttttttaagcacagcaagaactttaggttactatttatatctggacctcctatatttataagaacatggcaccgtcttgttgcaagaggaaaaaaaattaanaacattaaggaaaaccnaaaaacagtttgctactaaaatctaccaaatcctcagcaaatcaggaaagcaattatggagtgtttctatcctggcctgtaattgnctatncctttg

SEQ ID NO: 149 - DNA, 2133 bp, Homo sapiens
  ref <308>: DATABASE ACCESSION NUMBER: J03040
  ref <309>: DATABASE ENTRY DATE: 2001-06-18
cgggagagcgcgctctgcctgccgcctgcctgcctgccactgagggttcccagcaccatgagggcctggatcttctttctcctttgcctggccgggagggccttggcagcccctcagcaagaagccctgcctgatgagacagaggtggtggaagaaactgtggcagaggtgactgaggtatctgtgggagctaatcctgtccaggtggaagtaggagaatttgatgatggtgcagaggaaaccgaagaggaggtggtggcggaaaatccctgccagaaccaccactgcaaacacggcaaggtgtgcgagctggatgagaacaacacccccatgtgcgtgtgccaggaccccaccagctgcccagcccccattggcgagtttgagaaggtgtgcagcaatgacaacaagaccttcgactcttcctgccacttctttgccacaaagtgcaccctggagggcaccaagaagggccacaagctccacctggactacatcgggccttgcaaatacatccccccttgcctggactctgagctgaccgaattccccctgcgcatgcgggactggctcaagaacgtcctggtcaccctgtatgagagggatgaggacaacaaccttctgactgagaagcagaagctgcgggtgaagaagatccatgagaatgagaagcgcctggaggcaggagaccaccccgtggagctgctggcccgggacttcgagaagaactataacatgtacatcttccctgtacactggcagttcggccagctggaccagcaccccattgacgggtacctctcccacaccgagctggctccactgcgtgctcccctcatccccatggagcattgcaccacccgctttttcgagacctgtgacctggacaatgacaagtacatcgccctggatgagtgggccggctgcttcggcatcaagcagaaggatatcgacaaggatcttgtgatctaaatccactccttccacagtaccggattctctctttaaccctccccttcgtgtttcccccaatgtttaaaatgtttggatggtttgttgttctgcctggagacaaggtgctaacatagatttaagtgaatacattaacggtgctaaaaatgaaaattctaacccaagacatgacattcttagctgtaacttaactattaaggccttttccacacgcattaatagtcccatttttctcttgccatttgtagctttgcccattgtcttattggcacatgggtggacacggatctgctgggctctgccttaaacacacattgcagcttcaacttttctctttagtgttctgtttgaaactaatacttaccgagtcagactttgtgttcatttcatttcagggtcttggctgcctgtgggcttccccaggtggcctggaggtgggcaaagggaagtaacagacacacgatgttgtcaaggatggttttgggactagaggctcagtggtgggagagatccctgcagaatccaccaaccagaacgtggtttgcctgaggctgtaactgagagaaagattctggggctgtcttatgaaaatatagacattctcacataagcccagttcatcaccatttcctcctttacctttcagtgcagtttcttttcacattaggctgttggttcaaacttttgggagcacggactgtcagttctctgggaagtggtcagcgcatcctgcagggcttctcctcctctgtcttttggagaaccagggctcttctcaggggctctagggactgccaggctgtttcagccaggaaggccaaaatcaagagtgagatgtagaaagttgtaaaatagaaaaagtggagttggtgaatcggttgttctttcctcacatttggatgattgtcataaggtttttagcatgttcctccttttcttcaccctcccctttgttcttctattaatcaagagaaacttcaaagttaatgggatggtcggatctcacaggctgagaactcgttcacctccaagcatttcatgaaaaagctgcttcttattaatcatacaaactctcaccatgatgtgaagagtttcacaaatctttcaaaataaaaagtaatgacttagaaactgaaaaaaaaaaaaaaaaaaaaaaaaaaaaaa

SEQ ID NO: 150 - DNA, 4631 bp, Homo sapiens
  ref <308>: DATABASE ACCESSION NUMBER: AB002352
  ref <309>: DATABASE ENTRY DATE: 2001-06-18
gcgaactggctggaggagctaggggactagaggcggggtgggaggggggcgggtggaagggggaggaagtcccgtaacggagacgctggtcaggacgttcccacctcctctgacactgccgagtccgatcggagaggggtcaccgcctccttcagcgaggaggaggggggcggagcccgactcaggatcatggattttcctggtcactttgaacaaatcttccagcagctgaactaccagagacttcatggccagctctgtgattgtgtcattgtagtggggaatagacactttaaagcccaccgctccgtgctggcagcatgcagcacgcatttccgagccctgttctcagtggcagaaggagatcagaccatgaacatgatccagctggatagcgaggtggtgacagcagaggcctttgctgcactgattgacatgatgtatacctccaccctcatgctgggggagagcaatgtaatggatgtcttattggcagcctctcacctgcatttgaactctgttgttaaggcatgtaaacattacttaacgacaaggacgctgcccatgtctccccccagtgagcgcgttcaggagcagagcgcccgcatgcagcgctcctttatgctacagcagctgggactaagcatcgtgagctcagccctcaattccagccagaatggcgaggagcagccagcccccatgagctcttccatgcgcagtaacctggatcagcgcacgcccttccccatgagacgccttcataagcgcaagcagtctgcagaggagcgggccaggcagcgcctccgaccctccatagatgagtctgccatttcagatgttacaccggagaatgggccttcaggggttcattctcgggaggagttcttttcaccagattctctgaaaattgtggataatcctaaagctgacggaatgactgataaccaggaagatagtgcgatcatgtttgatcagtcttttggcactcaagaagatgcccaggtgcccagccagtctgataacagtgctggcaacatggcacagttgtccatggcctctcgtgcaactcaggttgagactagttttgatcaggaagctgcacctgagaaaagtagttttcagtgtgaaaaccctgaggttggccttggtgagaaggagcacatgagagtggtggttaaatctgagcctctgagctcacctgagcctcaggatgaagtgagcgatgtgacctcacaagcagaaggcagcgagtctgtggaagtggaaggagttgtggtcagtgccgagaagatagacctcagccctgaaagcagtgatcggagtttttcagatccccagtctagcacagacagggtaggtgatatccatattttggaagtcacaaataacctagagcataagtccacttttagtatttcgaattttcttaacaagagcagaggaaataactttactgcaaatcagaacaatgatgataatattccaaacaccactagtgactgcaggctggagagtgaggccccctatttgttgagtccagaggctgggcctgcaggtgggccctcctctgcccctggctcccatgtagagaacccatttagtgaacctgcagactcccacttcgtcaggcctatgcaggaggtgatgggcctgccgtgtgtgcagacttcaggctaccaaggaggagaacagtttgggatggacttttccaggtctggtttgggcctccactcctccttctccagggtaatgataggttccccaaggggaggagccagtaactttccttactaccgccgcatagctcccaaaatgccagttgtaacttccgtcaggagctcacagatcccagaaaactctaccagttctcagctaatgatgaatggagctacgtcctcatttgaaaatggccatccttcccagcctggccctccacagttgaccagggcatctgcagatgttctgtcaaagtgcaagaaggccttatcagagcacaatgttttggttgtagagggagctcgcaagtatgcctgcaaaatctgctgcaaaacttttctgactttgacagattgcaagaagcacatccgtgttcacacaggtgaaaagccttacgcctgcctgaagtgtggcaagaggtttagtcagtccagccacctgtataagcactcaaagactacctgcctgcgctggcagagcagcaatcttcccagcactttgctctagctgtttgtccttacaagacaacgctgaggccagttgtcagactgaatttcttttggtaagcagttaatgcctttgggttcgaggcttccagctgcccagtggctcttaaacagtttagcaactaataaccggagaactaacatgtagtatttgtgctgctgcatttctgagtgaagtgcacgtcttgggaaagggatgcaatccctgaaaccaggtgcttccttggggttgagtaatgcagtcagaaagtagtttgtaattgatattaaaagtggcacatttaaaaatttaaaaattgaagtgcaaaaaaaattttttagcaatttttgtaaaactgtgtagcatttaaatttcctataccttctgatgggagtattatatccctgtatagtgatgcaaaatgcacttatgtgtaaccagtggtgatttggtgcctgtcttaaaggaaggcctttgaggacacacctgtctgccacaaatgctttaaagtgtatcatgagctagtcctaggcctcaaagtactgtattttttatttttacctgatttgcagtcataaacactgcactttggtgctgacactgggtccagagtgagcattctcttggactattagatgtatatacttttgaatacatcactgttggatagatgttttaacagttttttctggtttaaaaaccaaattgtaaatggagtgtgtacttgtagagagtgacaaggtattgtttgtttccctatgtgctgtttgagcagtattttaaccaacttgtattacagatgttacagttccatgttaggaagtcagaaaagacttgtgtttgtctttgttctgctgatgtggagtcatgttttgtggggtcttccatggcacatttacctgttgctccgtccagatgttgagggccagtctaggctgacacatcctacccgaggacaagcctgttctccatttcttcactctcccctccccatatagcaactctcccaggtttagattaccgttttcgacgacagattaaccaaaaatgccccacacaggttttattactgttatatactatacttttaacagtacagaccctaaattttattatttgttgctcccccaatctgataccaaatgtttaaagttgtttgaaatccaaacatggtagtgttcatgggtaaatattttctaggctatgtaagagttagcagcccatagcatagaagtaatcaagtagcatctgagactgttggaggcactagggcctctctgggccctacagcctcacttccccagcctcaccttgctgtcctctgacactgccatcagggctgttagtggcacctgtatgaggccaagtgtgcgtccaggggaacagcacaggttaatgcgtctccctagaactcatgaagtcagtttaattcatgcatgaacatgagttcattttatgttttatatagctttcttagacataccaaaccatcattcataaatcagataaattattcagtttttgtgtttagaaagctaagtatgtgtagctggaaacaaaaatgagcgtgttttctctcctgttaatctagagtgtgcagttacacatgtgtggataatttcatgttccaggggcgcttggcatctcccatggactgattcccaggaagaaaagcccaaagggaaacccacgattcctttcgagtagatgtgggaaagagcccattggaggatatgaggtcctgtgaaattcagttgtgtgtgtggctccttgttagcagtcatgttgacatggtgttaggaggctccccatccaccctttacatgatgtagggaccagtgtcttgtgagattaaccttgggacacagtgggttagcctggagaaaatgagaggccctgcctggacccagggagaggagccagtgacacaggcagagcggtgcagccctccttcccttccatttggaggaggtggtgccaggagcctgcccgcttacctctgctgaagcataagtggactttgcttttggggcttatctctgatacatgctggagccctgcctctccactgctagatggaacctggaatctctcatctacctcttagtctgtcagtttctacgtgtgagaagcaagcttgtgggccagtgtccttgtacatgctgtagcacttaaaaaataattccagggttccctggaaaaccagtcccagggttcctatgatctgtagtttctacctggattataactggttttgggtacctgaattttgattggttagccttaattatagtctggcgtgatcatgtagaatcttttctggtgaacagatcataaagttctatcaaggagttctatcaaggcatccatgtcagtggtgctatgctggttacaacttgagatttttgaaataaaaaatttgtcatatt

SEQ ID NO: 151 - DNA, 9175 bp, Homo sapiens
  ref <308>: DATABASE ACCESSION NUMBER: X65644
  ref <309>: DATABASE ENTRY DATE: 2001-06-18
tatgtttagtcccatatgctcttcctgaatcttgccactgcccatcaagagatagaatacatttcccctccccttgaacatggaagcaaccaagctttaagaagcacagctttggagacactccatgagtctgcactgctttcaggggaactagcacttaagaccttgtgtaacaaaatggacactggggacacagctctaggacaaaaagctacctcaaggtctggagaaactgataaagcatcaggtagatggagacaggaacaatcagctgttattaagatgagcacttttggcagtcatgaaggacagcggcaaccacaaatagagcctgagcaaatcggaaacacagcatcagcacaactgtttggttctgggaaactggcctcccctagtgaagtggtgcagcaagtcgcagagaagcaatatccaccgcatcgtccgagtccttactcatgccaacactcactctctttccctcagcactcattgccacagggggtcatgcacagcaccaagccacatcagagcctcgaaggtcctccgtggcttttccctggccctttgccatccgttgcctctgaggacttatttccttttcctatacatggccacagtggtggttatcctagaaaaaagatttcaagtctgaaccctgcttatagccaatactcccagaaaagtattgaacaggcagaagaggctcacaagaaagagcacaaacccaaaaagcctggcaagtacatttgcccttactgcagcagagcgtgtgccaaacctagtgtactgaaaaaacacatcaggtcccatactggggagcggccatatccatgtataccttgtggtttctctttcaagacaaagagcaatttgtacaagcacaggaagtcacatgcccatgcaattaaggcaggattagtacctttcacagagtcagctgtatctaaattggacctagaggctggttttattgatgtagaagcagaaatacattcagatggtgaacagagtacagacacagatgaggagagttctttatttgccgaggcttctgacaaaatgagtcctggtccacccatcccactggacattgccagcagaggcggctatcatgggtcattggaagaatcattgggaggtccaatgaaggtgccgattttgattatccctaaaagtgggattcctctccctaatgaaagctctcagtatattggccctgatatgctaccaaatccatctttaaatactaaggctgatgattcgcacacagtcaaacagaaacttgcactaagactgtcagagaaaaaaggacaagattctgagccatcgctcaaccttctgagcccgcacagtaaaggaagcactgattctggttacttttctcgctcagaaagtgctgagcagcaaataagccctcccaacacaaatgcaaagtcttatgaagaaatcatctttggaaaatactgtcggcttagtccgagaaatgcactcagtgttacaaccacaagtcaggagcgtgccgcaatgggtaggaagggcataatggaaccattacctcacgttaacaccaggttagatgtcaagatgtttgaagatcctgtttcacagctgatcccaagcaagggagatgtcgaccccagtcaaacgagcatgctgaaatccactaagttcaacagtgagtccagacaaccccagattattccatcatctatcaggaacgaaggaaaactttatccagcaaacttccaaggcagcaacccggttctcttagaagctcctgtagactcttcaccccttattagaagcaactcagtgccaacttcttcagcaactaatctaactattcctccttctttgagaggaagtcactcatttgatgaaaggatgactggttccgacgatgtattctatccagggaccgtgggcataccccctcagcgcatgctaagaagacaagcggcatttgagctgccttcggtacaggagggccacgtggaagtcgagcaccatggcaggatgttgaagggtatcagcagttcatccctgaaggaaaagaaattgtctcctggggacagggttgggtatgactatgatgtctgtcggaaaccctataagaagtgggaggactctgaaacaccaaagcaaaactacagggacatttcctgcttgagttctttaaagcatggtggagaatatttcatggatcccgtggtgccattgcagggagtaccaagcatgtttggaactacctgtgaaaacaggaaacgccggaaagagaagagcgtaggggatgaagaggacacgcccatgatctgcagcagcattgtaagcactcctgtgggcatcatggcttccgattatgaccccaaactgcagatgcaggaaggagtcaggagtggatttgccatggctggacacgaaaacctttctcatggtcacacggaacgctttgacccatgtcggccccaactgcagcctggaagtccatctcttgtgtcagaggagtcaccttcagccattgattcagacaagatgtcagacctagggggcaggaaacctcctggaaatgtgatttctgtgattcagcacaccaactcactgagccgacccaattcatttgaaaggtctgagtcagccgaacttgtggcttgcacacaggataaagccccttccccttcagagacttgtgacagtgagatttcagaagccccagtgagtcctgagtgggctccacctggggatggtgcagaaagtggggggaaaccctctccatctcagcaggtgcagcagcagtcctatcacacacagcccaggctagttcggcaacacaacatccaggttcctgagattcgagtgaccgaggagcctgataaacctgagaaggagaaggaagcccagagcaaagagccagagaagcctgtggaagaatttcagtggccccagagaagtgagaccctttcccagctccccgcggagaagttgcctcccaaaaagaagcgtctgcgacttgcagatatggagcactcctcaggggagtccagctttgaatccacaggcacaggcctctcccgcagccccagccaagaaagcaacttgtcccacagctccagtttctccatgtcttttgaaagagaagaaaccagtaagctttctgcacttcctaagcaggatgagtttgggaagcattcagagtttctgactgtccctgctggttcatactcattgtctgtcccaggccatcaccaccagaaagagatgcgacgctgctcatcagagcagatgccttgtcctcacccagcggaagtcccagaagttcggagcaaatcatttgattatgggaatctgtcccatgctcctgtgtcgggagcagcagcctccacggtatcaccgtccagggagaggaagaaatgctttctggtgcggcaagcttccttcagtggctccccagaaatctcccagggcgaggttggcatggatcagagcgtgaagcaagagcagctggagcacctgcatgctggcctccggtccgggtggcaccatggcccgcctgctgtgctgcctcctcttcagcaagaggacccagggaagcaggtggcgggtccttgtcccccgctgagctcggggccactgcacctggcccagccacagatcatgcacatggacagtcaggaatctttgagaaatcccttgatccaaccaacatcctatatgacaagcaagcacttacctgaacagccacacttatttccacatcaagagacaattccattttctccaatccagaatgccttgtttcagtttcagtatcctacagtttgtatggttcatttaccagctcagcagcctccctggtggcaggcacatttcccacatccctttgctcagcaccctcagaagagctatggcaagccctcttttcagacagaaatccattcgagctatcccttagagcatgtggcagagcacactggaaagaaacctgctgagtatgcacacacgaaagagcagacctacccatgttattcaggagcatcagggctacacccaaagaaccttcttccaaagtttccatcagaccagagcagtaagtcaactgaaacgccctctgagcaggttcttcaagaagattttgcctcggcaaatgctgggtctttgcagtccctcccaggaacagtggttcctgttcggatccagacgcacgtaccatcctatggaagtgtcatgtacacaagcatttctcagatacttgggcagaatagccctgccattgtcatatgcaaagtcgatgagaatatgacccaaaggacactggtcaccaacgcagccatgcaagggataggattcaacattgcccaggtgctggggcagcatgcgggcttggagaagtaccccatttggaaagcacctcagactttgcccctcggcttagaatcctccatccccttgtgtttaccttccacctctgacagcgtggccaccctgggaggtagcaagcgaatgctttctccagccagtagcttggagctcttcatggaaaccaagcagcagaaaagggtcaaagaagaaaagatgtacggacagattgtggaggagcttagtgctgtggagctgaccaactcagacatcaaaaaggacctctcccgcccccagaaaccccagctggttcgacaaggatgtgcttctgagccaaaagatggcttgcagtcagggtcatcttccttctcctcgctgtcgccctcctcatctcaagactatccttctgttagcccgtcttccagggagccattcccgcccagcaaggagatgctttccggttcccgggcaccacttccggggcagaagtccagtgggccttctgaaagcaaagaatcttcagatgaattagatatcgatgagacggcatcggacatgagcatgagcccacagagttcttcattaccagcaggagatggtcagctggaagaggaagggaagggccacaagcggcctgttggcatgctggtccgcatggcctctgcccccagcgggaacgtggcagactcaactcttcttctcacggacatggcagatttccagcagattcttcagttccccagtctgcggacaacaactactgtgagttggtgcttcttgaattatacaaaacccaattatgtgcaacaggccaccttcaaatcctcggtttatgcttcatggtgcattagttcctgtaatccaaacccatcaggattgaacaccaagaccacgctggctcttctgaggtccaagcaaaaaatcactgcagaaatttatactctggctgctatgcataggcctggaaccggcaagcttacatcatcaagtgcttggaagcagtttactcagatgaaacctgatgcgtcctttttatttggcagcaaactagaaaggaaactagtgggaaatatcttaaaggaaagagggaaaggagatattcatggagataaagatattggatccaaacaaactgagccaatccgaattaaaatatttgaaggagggtacaaatcgaatgaagattatgtatatgtcagaggacgtggccggggaaagtacatttgtgaagaatgtgggattcgctgtaagaagccaagcatgctcaaaaaacacatccgtacccatactgatgttcggccttatgtatgcaagttatgtaactttgccttcaaaacgaaaggaaacctaacgaagcatatgaaatctaaagcacacatgaaaaaatgcctggaattgggagtctcaatgacatcggtggatgatacagaaactgaggaagcagaaaatttggaagatttgcacaaagcagcagagaagcatagcatgtccagcatttcaactgatcatcagttctccgatgctgaggaatcagatggtgaggatggagatgataatgatgatgatgatgaagatgaagatgactttgacgaccagggagatttaacaccaaaaacaagatcaagaagcaccagtcctcagcctcctagattctcctccttgcctgtgaatgttggcgccgtaccccacggggttccttcagatagttccctgggacattcttcgttgatcagctatttggttactttgccaagtattcgagttactcagcttatgacacccagtgattcatgtgaagatacccagatgacagaataccagaggctattccagagcaaaagtacggactcagaaccagacaaagacagattggacatacctagttgtatggatgaggagtgcatgctaccttcagagccaagctcctctcccagggacttctcaccctcaagccaccattcctctccaggatatgattcttcaccctgtcgagataattcaccaaagaggtatctgatacccaaaggagatttatctcccaggagacatttatcacctaggagagatctgtcacccatgagacatctttcaccaacaaaggaagctgcattgagaagagagatgtcccaaagagatgtttcaccaagaaggcatttgtctccaaggaggccagtgtctcctgggaaagatatcacagcaagaagagacctctcccctagaagagagagaagatacatgaccacaataagagcgccatctcccagaagggctttataccataacccaccattgtccatgggacagtatttgcaagcagagccaattgtattggggcctcctaatttaagaagaggattacctcaggttccttacttcagtctctatggagaccaagaaggtgcttatgaacatccaggctccagccttttccctgagggtcctaatgactatgtcttcagtcatcttccactccactctcagcaacaagtgcgagcccctatccccatggtgcccgttggtgggatccagatggttcactccatgccgccagccctttccagtttacatccttcacccacattgcccctgccaatggagggctttgaggagaagaaaggcgcgtcaggggagtccttctccaaggacccctatgtgctttctaagcagcatgagaagcgaggtcctcacgctttgcagtcatctggtccgcctagcactccctcctctcctcggctgttgatgaaacagagcacttcggaagacagcctaaacgcaacagagcgggaacaggaggaaaatatacagacttgtacaaaagccattgcctctctccggattgccacggaagaggcagctctgctcgggccagatcagccagcgcgggtgcaggagccccaccagaaccccctgggaagtgcacatgttagcattagacactttagtagacctgagccaggtcagccctgtacctcagccacccaccctgacttgcatgatggtgaaaaggacaattttggtacatcacagactccattagctcactccacgttttacagcaagagttgtgtggatgacaagcagttggactttcacagcagcaaggaattatcttcaagcacagaggaaagcaaagatccttcatcagaaaagagtcagctacattgatctatgatgcatggagactttcatttccacattttcccatttttttgtttttgtttttctagaaatggaggtaatccagtttatagcatgcctgtcctaagttacagtagtttgctattatatatacttttgttatatcaaaagaattaggtaaattaacaagtcatcatgagcctgaccaaaacaaaatttgaaattaacctattgggtctggtacttttaaaattgtacagatgtttgtgccttttctttactttgcttatattcttataagcattttttagcagtaatttgtacatattttagaatttgtgtatctgctttgtaataaatgtaatttctttccttttttggacacttggatctaaatgatgtaaagcaaaacagcatcaatatatatgtgaggttgcactaaaacatatttttatatgattaaaactgaacagcttttatgtacagctctgattctgtaatactaatatttatttactttgtttcataaattgtacattttttcttaatgttgtggattgcttttctatgtgaagcatgggatttactgttgcgtaactagaacaaaaatgtacattgtaaacaagatatttaaactagagtatcttattctgcacttatgcattagttaaaaaaagataaaggatgtatcagtcagttcttaactcttgtatatttttttgtctcttgtttgctggattgactataacttaagtgctgattgtgattttaaaatgatagtaccgtaaagcattaaagtaaacaatgtgctattgtgagttttttcaaagctttataaatcagttataaataatattaaaagtatttggtcttatgtgaacatgttgatctatatactcatctaaaaatatgggaaaacattccaccccatgtaaatatgtacaagtgcatcactggtacaattttatgtaactcagttggacactaggttgccacagacctatgctaggtgtctttaaaaaattaaggtgacaaagcacatgggactgtgtagagcttggttatcggccggcccggtggcttggcaggcagtctgtcgctgctcatggagaagacctgggcttagcaatctccttagttcttgctacacaggatggtgactggaactaaggctacacagagggtcgcacttggactctgagggttgggtgtggaagggggaaaaggggatggagacctgctccccagctcttcctgtcagccggtttacatgggaacagggttaacatctgtgttaggggaggtcaccttaccctttttcataggggaagagtgtcacactcctggctatctcagggggaatggggaaaagaatctttcaagggcaaagaactcgtgggaggatgtctgttgtatgtaatactcacaatggcttttggttagtgttgaaggtgggaagagcatttgtaggtccagaagagtgaaagagagggaggggtgcagcaacatgtgcacaggcacgcacatgtgtgcacgcacacatacaatctgggttatctttgtgctatatagtggattataattctgtgaaaccaagtttgtatattgaattacattaaggagtgttctttaaaaagagaaataaatatacaattacatgcttaaaaaaaaaaaaaaaaaaaaa

SEQ ID NO: 152 - DNA, 4508 bp, Homo sapiens
  ref <308>: DATABASE ACCESSION NUMBER: U04953
  ref <309>: DATABASE ENTRY DATE: 2001-06-18
cgggcagcgtggaccccggatgagttgcttttaggcttgctggcccgcggggctgtccaggcacgcgaggcccctcaggtacgccctctcttccctgcaggatccggccctcaaagacgagggtcacgcacgcgttacaaccccgaaacagtagcacaagatttaatttttaaaagagcgtgtttcttcggggcttgccgttcgttcgtttccagcctcaggaatttatggtcgcctttttgaatgagcaacaaaatgcttcaacaagttccagaaaacataaattttcctgctgaagaagagaaaatcttggagttttggactgaatttaattgttttcaggaatgcttaaagcaatcaaaacataaaccaaaatttaccttctatgatggtcctccttttgcaactggactgcctcactatggacatatacttgcgggtacaattaaagatatagttacaagatatgctcaccagagtgggtttcatgttgacagaagatttggatgggattgccatggcttacctgtggaatatgaaattgataagacactgggaatcagaggaccagaggatgtggccaaaatggggattacagagtataacaatcagtgccgagcaattgtgatgagatattctgctgagtggaagtctactgttagcagacttggccgatggattgactttgacaatgactataaaactctgtatccacaattcatggaatcagtctggtgggtcttcaaacaactctatgataaaggccttgtttatagaggtgtgaaagtcatgcccttctctacggcatgtaacactccactttccaacttcgagtcacaccagaattataaggatgttcaagatccttcagtatttgtaactttccctttggaagaagatgaaactgtatctttagttgcttggacaaccactccctggactctacctagtaaccttgctgtgtgtgttaatccagaaatgcaatatgtgaaaattaaagatgttgccagaggacgattactcattttaatggaagccagattgtcagccctctataaattggagagtgactatgagatccttgaaagatttcctggtgcctatcttaaaggcaagaagtacaggcccctgtttgactatttcctgaagtgtaaagagaatggcgctttcactgtgcttgttgacaactatgtgaaggaagaagaaggcacaggggttgtccaccaagctccttacttcggtgctgaggactatcgggtctgtatggactttaacattattcggaaagactcactccctgtttgccctgtggatgcttcaggctgcttcacaacggaggtgacagatttcgcaggacagtatgtgaaggatgctgacaaaagtatcatcaggactttgaaggaacaaggccgacttctggttgccaccaccttcactcacagctaccctttttgctggagatcagacactcctctaatttacaaagcagtgcccagctggtttgtgcgagtggagaacatggtggaccagctcctaaggaacaatgacctgtgctactgggtcccagagttggtacgagaaaaacgatttggaaattggctgaaagatgcacgtgactggacaatttccagaaacagatactggggcacccccatcccactgtgggtcagcgatgactttgaggaggtggtatgcattgggtcagtggcggaacttgaagaactgtcaggagcaaagatctcagatctccacagagagagtgttgaccacctgaccattccttcacgctgtgggaagggatccttgcaccgcatctctgaagtgtttgactgttggtttgagagtggcagcatgccctatgctcaggttcattacccgtttgaaaacaagagggagtttgaggatgcttttcctgcagatttcattgccgagggcatcgaccaaaccagaggatggttttataccctgctggtgctggccacggccctctttggacaaccgcctttcaagaacgtaattgtgaatgggcttgtcctggcaagtgatggccaaaaaatgagcaaacggaaaaagaattatccagatccagtttccatcatccagaagtatggtgctgatgccctcagattatatctgattaactcccctgtggtgagagcagaaaacctccgctttaaagaagagggtgtgcgggacgtccttaaggatgtactgctcccatggtacaatgcctatcgcttcttaatccagaacgttctgaggctccagaaggaggaagaaatagaatttctctacaatgagaacacggttagagaaagccccaacattacagaccggtggatcctgtccttcatgcagtctctcattggcttctttgagactgaaatggcagcttataggctttatactgtggtgcctcgcctggtcaagtttgtagatattctgaccaattggtatgttagaatgaaccgcagaagattaaagggtgaaaatgggatggaggattgtgtcatggccctagaaaccttgtttagtgttctgctttctctttgcagacttatagctccctacacaccttttctcactgaattgatgtaccagaatctaaaggtgctgattgaccctgtttctgttcaggacaaggacacactcagcattcactacctcatgctgccccgtgttcgagaagaattgattgacaagaaaacagagagtgcagtatctcagatgcagtctgtgattgaacttggaagagtgatcagagaccgaaaaactattcccataaagtatcctttgaaagaaattgtggttatccatcaagatccagaagctcttaaagatatcaagtctttggagaagtatatcattgaggaactcaatgttcgaaaagttacactgtctacagataaaaacaagtatggcattcggctaagggcagaaccagatcacatggtcctggggaagcgtctgaagggagcctttaaggcagtgatgacgtccatcaagcagttgagcagtgaggagctggagcagttccagaagactgggaccattgttgtggaaggccatgaattgcacgatgaagacatccgcctcatgtacacctttgatcaggccacaggtgggactgcgcaatttgaagcacactcagatgctcaggctttggtcctcttagatgtcactcctgaccagtcaatggtagatgaaggaatggctcgggaagtcatcaatcgcatacagaaacttcgcaaaaagtgcaatctggttccaactgatgaaatcacagtgtactataaagcaaagtctgaaggaacatatctgaatagtgttattgaaagccacacagagttcatatttaccaccataaaggctcccttgaaaccatatccagtttctccatcggataaagtccttattcaagaaaaaacacagttgaagggatctgaactggaaattacactcaccagaggatcttcccttcctggtcctgcttgtgcatatgtcaatcttaacatttgtgcaaatggcagtgaacaaggtggagtattgctcctggaaaatccaaaaggtgacaataggttggaccttttaaagctgaagagtgttgtcactagcatttttggtgtgaaaaatacagagctggctgtcttccatgatgaaacagaaatacaaaaccaaactgacttactgagtcttagtggaaaaacactttgtgtgactgcaggatcggctccctctctgatcaacagttctagtactcttctttgtcagtatatcaacctacagctcctgaatgcaaagccacaagagtgtttaatggggacagtgggcactctcctgcttgaaaacccacttgggcagaatggactcacccaccaaggtcttctgtatgaagcagccaaggtgtttggccttcggagcaggaagctaaagctgtttctgaatgagacccaaacgcaggaaattacagaagacatccccgtgaagactttgaatatgaagactgtgtatgtttctgtgttaccaacaacagcagacttctagcatgtacttatcaatgttgttcggtcagcccttccctaattacacctatcccctacacatacatgcacatagacacacacatgaacacactgaagatatttccttcaggtgtgtgtaaaatatgctgcttggattgaaattcaaatgggattgattagtcaagtaacttgagacctcacagtaatcttcacacttaaccttagacacctatgcagtcatgttgggagcaggttacaatgttacttcagcccacagtttatttctattcttgagttcttaagtacagaagatagaagtgatttaaatggcatagtatatatatcattttctggccttttaaaatttatttgagacctcttgatgaaatggacatattatatatttctgccacctggattttcctggataatttgatggaatattttaagtttcagtaaatcagaacaataaacaaactcagatat

SEQ ID NO: 153 - DNA, 1552 bp, Homo sapiens
  ref <308>: DATABASE ACCESSION NUMBER: U10323
  ref <309>: DATABASE ENTRY DATE: 2001-06-18
cggttggtgcggcctccattgttcgtgttttaaggcgccatgaggggtgacagaggccgtggtcgtggtgggcgctttggttccagaggaggcccaggaggagggttcaggccctttgtaccacatatcccatttgacttctatttgtgtgaaatggcctttccccgggtcaagccagcacctgatgaaacttccttcagtgaggccttgctgaagaggaatcaggacctggctcccaattctgctgaacaggcatctatcctttctctggtgacaaaaataaacaatgtgattgataatctgattgtggctccagggacatttgaagtgcaaattgaagaagttcgacaggtgggatcctataaaaaggggacaatgactacaggacacaatgtggctgacctggtggtgatactcaagattctgccaacgttggaagctgttgctgccctggggaacaaagtcgtggaaagcctaagagcacaggatccttctgaagttttaaccatgctgaccaacgaaactggctttgaaatcagttcttctgatgctacagtgaagattctcattacaacagtgccacccaatcttcgaaaactggatccagaactccatttggatatcaaagtattgcagagtgccttagcagccatccgacatgcccgctggttcgaggaaaatgcttctcagtccacagttaaagttctcatcagactactgaaggacttgaggattcgttttcctggctttgagcccctcacaccctggatccttgacctactaggccattatgctgtgatgaacaaccccaccagacagcctttggccctaaacgttgcatacaggcgctgcttgcagattctggctgcaggactgttcctgccaggttcagtgggtatcactgacccctgtgagagtggcaactttagagtacacacagtcatgaccctagaacagcaggacatggtctgctatacagctcagactctcgtccgaatcctctcacatggtggctttaggaagatccttggccaggagggtgatgccagctatcttgcttctgaaatatctacctgggatggagtgatagtaacaccttcagaaaaggcttatgagaagccaccagagaagaaggaaggagaggaagaagaggagaatacagaaagaaccacctcaaggagaggaagaagaaagcatggaaactcaggagtgacattcccttcactccttttcctacccaagggaaagactggagcctaagctgcctgctactggctttacatggtgacagacattccgtggataggaagatagcaggagaaagtaactccatagagtgtcattccactggttgatattggcttagctgccagtctcccatttgtgacctatgccatccatctataatggaggataccaacatttcttcctaatattctataatctccaactcctgaaaacccctctctcaactaatactttgctgttgaaatgttgtgaaatgttaagtgtctggaaatttttttttctaagaaaaactattaaagtactt

SEQ ID NO: 154 - DNA, 481 bp, Homo sapiens
  ref <308>: DATABASE ACCESSION NUMBER: AI126840
  ref <309>: DATABASE ENTRY DATE: 2001-06-18
gaaaacaacacttttatttacaacaaatagatggtagtgcaacagcactcgtggatgtttacgataaataaaaatactagtattctggcatcctttgggtacaggcccttttatatttatagatgtctacaatgactcataaaagtaaaatcaataaaggctattaatttgtatttcaacctgaatttgagaaaccaatgaagattaatcatttatttgggatctagatccatatatctgaaaactgaagtataaagtttctcatttccatttaccttgtcaacaaacatatcccaaacatttcagcatctgtaaaaggtgatctatttagcatctgtaataagtgatttatagttatatatgctaaataaaggttgacacagctggatcctagaagctcagattttataaatctaaaatagattaagtatttatgccaaaaaacaagaactggatctaggattttattttaaattatgga

SEQ ID NO: 155 - DNA, 486 bp, Homo sapiens
  Modified_base 1 ... 486: n = a,c,g, or t
  ref <308>: DATABASE ACCESSION NUMBER: AI697151
  ref <309>: DATABASE ENTRY DATE: 2001-06-18
ttttatttttatttttcattgttttattcagacagggttcattcaaggaaaggcaacttagtttttgtatgtgtgagctttatttttttactatattggttaatataaaagttatgaattaaacgtattcttatctcctatacccaggagtgaatccatgaaattctcagatagtaatccaaaacaataggtcctatttttaaaaatagctaaagtgggccaggcgcagtggctcatgcctgtaattccgacactttgggaggccaagggcagatcatgaggtcaggagttcaagaccagcctgatcaacatggcaaaaccctgtctctactaaaaatacaaaaattagccaggcgtggtggcaagcatctgtaataccagctactcaggaggctgaggcaggagaatcacttgatcctgngaggcagaggttgcagtgagtcaagatcgcgccactgcactccagcctcagtgacacagcaagac

SEQ ID NO: 156 - DNA, 1594 bp, Homo sapiens
  ref <308>: DATABASE ACCESSION NUMBER: U94703
  ref <309>: DATABASE ENTRY DATE: 2001-06-18
gccaagcttggcacgaggtggcacgaggggcttgttgggatccgttgagtgatgggagagtgtgctctttaacttcggagagagatgcgctctcgtgtagccgtcagggcctgccataaggtctgcaggtgcctgttgtctgggtttgggggtcgagtagatgcggggcagccggagctgttgacggaaaggagtagccccaaaggagggcatgtgaagtcgcacgcggactcgaggggaacggcgagcacccagaagcccccgggtctggagagggaagcgaggcgctgttagagatctgtcagagaaggcatttcctaagtggaagcaagcagcagcttagccgggattctcttctgagtgggtgccatcccggcttcggacccttgggcgtagagttgcggaagaacctggccgcagaatggtggacctcggtggtggtgttcacggagcggtattcccggtggacgccctccaccacaaaccaagccctttgctacccggggacagtgccttcaggttagtttctgcagaaactctacgcgaaatcttgcaagacaaagagctgagtaaggaacagctagtagcatttcttgagaacgtattaaaaacttctgggaaactacgggagaaccttcttcacggtgccttggaacactatgttaattgcctggatctggtaaacaagaggctaccttatggccttgctcagattggagtgtgttttcatcctgtttttgacactaagcagatacgaaatggtgttaaaagtattggtgagaagactgaagcttcgttagtatggtttactcctccgagaacttcaaaccagtggcttgatttctggttacgtcatcgactccagtggtggagaaagtttgccatgagtccatctaacttcagcagcagtgactgtcaggatgaagaaggccggaaaggaacaaactttactacaattttcccctggggaaaggagttaatagaaaccctgtggaacttaggagatcacgaacttttacacatgtatcctggcaatgtgtctaaattacatggccgagatggacgaaaaaatgtggttccttgtgttctctctgtaaatggggacctagaccgaggcatgctggcctacctctatgattctttccagctgacagagaactcctttacaagaaagaaaaatcttcatagaaaggtacttaaacttcacccttgtttagcccctattaaggttgctttggatgtaggaagaggccccacattggaactaagacaggtttgtcaagggctatttaatgagttactagaaaatgggatttctgtgtggcctggttatttggaaactatgcagtcctcattggaacaactttattcgaagtatgatgaaatgagtattctcttcacagttttggttactgaaactactttggagaatggattaatacatctgagaagcagagacaccacaatgaaggaaatgatgcatatatccaaattaaaagactttttgattaagtatatatcatcagctaagaatgtatagatttttatatttgtataataaatattcttctctcctaaaaaaaaaaaaaaaaaa

SEQ ID NO: 157 - DNA, 5022 bp, Homo sapiens
  ref <308>: DATABASE ACCESSION NUMBER: M64571
  ref <309>: DATABASE ENTRY DATE: 2001-06-18
ccacgtcgcccaccggtgccccggcgctctcctggctcccttctgccccagctccgtctcggcggcggcgggcagttgcagtggtgcagaatggctgacctcagtcttgcagatgcattaacagaaccatctccagacattgagggagagataaagcgggacttcattgccacactagaggcagaggcctttgatgatgttgtgggagaaactgttggaaaaacagactatattcctctcctggatgttgatgagaaaaccgggaactcagagtcaaagaagaaaccgtgctcagaaactagccagattgaagatactccatcttctaaaccaacactcctagccaatggtggtcatggagtagaagggagcgatactacagggtctccaactgaattccttgaagagaaaatggcctaccaggaatacccaaatagccagaactggccagaagataccaacttttgtttccaacctgagcaagtggtcgatcctatccagactgatccctttaagatgtaccatgatgatgacctggcagatttggtctttccctccagtgcgacacgtgatacttcaatatttgcaggacaaaatgatcccttgaaagacagttacggtatgtctccctgcaacacagctgttgtacctcaggggtggtctgtggaagccttaaactctccacactcagagtcctttgtttccccagaggctgttgcagaacctcctcagccaacggcagttcccttagagctagccaaggagatagaaatggcatcagaagagaggccaccagcacaagcattggaaataatgatgggactgaagactactgacatggcaccatctaaagaaacagagatggccctcgccaaggacatggcactagctacaaaaaccgaggtggcattggctaaagatatggaatcacccaccaaattagatgtgacactggccaaggacatgcagccatccatggaatcagatatggccctagtcaaggacatggaactacccacagaaaaagaagtggccctggttaaggatgtcagatggcccacagaaacagatgtatcttcagccaagaatgtggtactgcccacagaaacagaggtagccccagccaaggatgtgacactgttgaaagaaacagagagggcatctcctataaaaatggacttagccccttccaaggacatgggaccacccaaagaaaacaagaaagaaacagagagggcatctcctataaaaatggacttggctccttccaaggacatgggaccacccaaagaaaacaagatagtcccagccaaggatttggtattactctcagaaatagaggtggcacaggctaatgacattatatcatacacagaaatatcctctgctgagaaggtggctttgtcctcagaaacagaggtagccctggccagggacatgacactgcccccggaaaccaacgtgatcttgaccaaggataaagcactacctttagaagcagaggtggccccagtcaaggacatggctcaactcccagaaacagaaatagccccggccaaggatgtggctccgtccacagtaaaagaagtgggcttgttgaaggacatgtctccactatcagaaacagaaatggctctgggcaaggatgtgactccacctccagaaacagaagtagttctcatcaagaacgtatgtctgcctccagaaatggaggtggccctgactgaggatcaggtcccagccctcaaaacagaagcacccctggctaaggatggggttctgaccctggccaacaatgtgactccagccaaagatgttccaccactctcagaaacagaggcaacaccagttccaattaaagacatggaaattgcacaaacacaaaaaggaataagtgaggattcccatttagaatctctgcaggatgtggggcagtcagctgcacctactttcatgatttcaccagaaaccatcacaggaacggggaaaaagtgcagcttgccggccgaggaggattctgtgttagaaaaactaggggaaaggaaaccatgcaacagtcaaccttctgagctttcttcagagacctcaggaatagccaggccagaagaaggaaggcctgtggtgagtgggacaggaaatgacatcaccaccccaccgaacaaggagctcccaccaagcccagagaagaaaacaaagcctttggccaccactcaacctgcaaagacttcaacatcgaaagccaaaacacagcccacttctctccctaagcagccagctcccaccaccattggtgggttgaataaaaaacccatgagccttgcttcaggcttagtgccagctgccccacccaaacgccctgccgtcgcctctgccaggccttccatcttaccttcaaaagacgtgaagccaaagcccattgcagatgcaaaggctcctgagaagcgggcctcaccatccaagccagcttctgccccagcctccagatctgggtccaagagcactcagactgttgcaaaaaccacaacagctgctgctgttgcctcaactggcccaagcagtaggagcccctccacgctcctgcccaagaagcccactgccattaagactgagggaaaacctgcagaagtcaagaagatgactgcaaagtctgtaccagctgacttgagtcgcccaaagagcacctccaccagttccatgaagaaaaccaccactctcagtgggacagcccccgctgcaggggtggttcccagccgagtcaaggccacacccatgccctcccggccctccacaactcctttcatagacaagaagcccacctcggccaaacccagctccaccaccccccggctcagccgcctggccaccaatacttctgctcctgatctgaagaatgtccgctccaaggttggctccacggaaaacatcaagcatcagcctggaggaggccgggccaaagtagagaaaaaaacagaggcagctgctacaacccgaaagcctgaatctaatgcagtcactaaaacagccggcccaattgcaagtgcacagaaacaacctgcggggaaagtccagatagtctccaaaaaagtgagctacagccatattcagtccaagtgtggttccaaggacaatattaagcatgtccctggaggtggtaatgttcagattcagaacaagaaagtggacatctctaaggtctcctccaagtgtgggtctaaggctaacatcaagcacaagcctggtggaggagatgtcaagattgaaagtcagaagttgaacttcaaggagaaggcccaggccaaggtgggatccctcgataatgtgggccacctacctgcaggaggtgctgtgaagactgagggcggtggcagcgaggctcctctgtgtccgggtccccctgctggggaggagccggccatctctgaggcagcgcctgaagctggcgcccccacttcagccagtggcctcaatggccaccccaccctgtcagggggtggtgaccaaagggaggcccagaccttggacagccagatccaggagacaagcatctaatgatgacattctggtctcgtcttccgtctcccccgtgttcccctcttgtctcccctgttcccctctcccttccctcctcccatgtcactgcagattgagacctacaggctgacgttccgggcaaatgccagggcccgcaccgaccacggggccgacattgtctcccgccccccacacttccctggcggccccaactcgggctcccgggtccttggccccctttcccgggctgtccactagaccagtgagcgcttgggcgccgtgctgggcagcccgctaggctcgccttccctcctgctttgcgtgcccggggcagcagcagccctgccccacacctcctctcactccccagcctgggcccatctccctgctttggtcttgccccatcactgcgccactgctccgtggaggaggttgggagggggttggggtggttgaggctaagttgggatctaggagaggagaaccagattctatcctcatctttttttggttctttggtccaaacccaaaagaaactgacatgccctcccttctccctggatctacctggagggaagagtggaggtggattccgagtggtgacaggacgctgaccgtggagcttaagccactgcctctccctctggtcccacaaatgggcgcccccccctccccatgcaggtggtgtcgggcccttcttgctgccctgccccaagttgggggtcagtgctgcctgtccccatgcttaacatacccgcctagctgctgtcacatttttcttgttttgtccttttatttttttctaataacctaaaaactggcaaaatagttctgcaggttgaagccatgtctacatgaaagtcctcagtaagtgttagagggaacagggcggagatatccttatgccacccccgctggaggatgtgggcagccttagggccctggaggcggtgcggcagggaagaggggtgcagaggctgtggctggtgagccggtcaggcacacaaggggcccttggagcgtggactggttggttttgccattttgttgtgtgtatgctgcttttcttttctaaccaagaggctggttttggcatctctgtcccattccctgggatctggtggtcagccctaggataaaaagccagggctggagaacaagaaagggccaggagatggaattccttcaggccggcacccacaccctaggacatgtaagccctcatgtccaagggagcctcatgcagatagtaggaaatcaggtctggaaatttaaaaataaaaggcatgagactaaggctatctgcttcccttatgccctgactggagaggggagggaggagaggcaaggcccacagagggcatcccagctaggccttgggatggctgcagtgaggagaaatcccgggaactgtattgacacaaagattcttattgcacttgtattttttgtattaaagtttgcatggtttctaataaaggattcaaacat

SEQ ID NO: 158 - DNA, 5967 bp, Homo sapiens
  ref <308>: DATABASE ACCESSION NUMBER: AB002371
  ref <309>: DATABASE ENTRY DATE: 2001-06-18
aagcttaatactgagcatcaagaaattctttaataaatataagtgatatttattaagacgtgtaataaggaaatgttcatgtcttatttttgtgttagatttttttagaatctacttttgttagagttttataaatacagttagtgtttgagatagaaagagaaaagaattagttttcttcctcttctacctgctcatgaacttgatttttttctcccaacaattgaagagccaagaaaaagggagattcttaagagatgggaaatagaatctcatctacccctgtttccctcagaacagtgaaactgaatcttaagggtaagatagaatagtgtgtacttaacttagatggagaagaaaggctgccaaaatgagatctgaagcgctattacaaatatttccatcattactgtacttcagaatgaattacaaccgtaagtttttttacttcctcattcataaatttgattattccttataccacttctcagctttcatcattctttattgtacttttctatgtaatgtttgcctattatacagcaacttaagagaactgtaagtttggacatttcattttggtgttgataatagaatatctttgaatagttctatagttgatgagtagaaccatgaaccaagtaacttaaagtccttgatgttatttattacagagaactataatagaagctctcccgctaatgtttccatcatgtgtacaaaaagttttcttgttattaaagccagtccgtttaacttacaataagcataaatagctaagctgtgaaagttacctgtgataatgctaattttcccatttattaaaaggcaagttgttttccgatcataagaaatttagaaaagccatccaaagataaattccgagtgatatattcctgctgtttgttatgttttctcaaattaattgagttttattttacaatgacaggagttattaaagtattttatttttattatgattaagattttcaaagtaacatttcttatatgaaagaaattatgttaatgcatgtttttcttacatgggaaatcatatattttaaaaatgattttaaaattcgttttactttaagttgtattatctttctcaaaagtggctagtgcttcaccagaaaaaaagacaccagcataactcagtgtatctttatttacataggaaatggccattttcaagattgcagctctccaaaaagttgtagataatagtgtttctttgtctgaactagaactggctaataaacagtacaatgaactgactgctaagtacagggacatcttgcaaaaagataatatgcttgttcaaagaacaagtaacttggaacacctggagtgtgaaaacatctccttaaaagaacaagtggagtctataaataaagaactggagattaccaaggaaaaacttcacactattgaacaagcctgggaacaggaaactaaattaggtaatgaatctagcatggataaggcaaagaaatcaataaccaacagtgacattgtttccatttcaaaaaaaataactatgctggaaatgaaggaattaaatgaaaggcagcgggctgaacattgtcaaaaaatgtatgaacacttacggacttcgttaaagcaaatggaggaacgtaattttgaattggaaaccaaatttgctgagcttaccaaaatcaatttggatgcacagaaggtggaacagatgttaagagatgaattagctgatagtgtgagcaaggcagtaagtgatgctgataggcaacggattctagaattagagaagaatgaaatggaactaaaagttgaagtgtcaaaactgagagagatttctgatattgccagaagacaagttgaaattttgaatgcacaacaacaatctagggacaaggaagtagagtccctcagaatgcaactgctagactatcaggcacagtctgatgaaaagtcgctcattgccaagttgcaccaacataatgtctctcttcaactgagtgaggctactgctcttggtaagttggagtcaattacatctaaactgcagaagatggaggcctacaacttgcgcttagagcagaaacttgatgaaaaagaacaggctctctattatgctcgtttggagggaagaaacagagcaaaacatctgcgccaaacaattcagtctctacgacgacagtttagtggagctttacccttggcacaacaggaaaagttctccaaaacaatgattcaactacaaaatgacaaacttaagataatgcaagaaatgaaaaattctcaacaagaacatagaaatatggagaacaaaacattggagatggaattaaaattaaagggcctggaagagttaataagcactttaaaggataccaaaggagcccaaaaggtaatcaactggcatatgaaaatagaagaacttcgtcttcaagaacttaaactaaatcgggaattagtcaaggataaagaagaaataaaatatttgaataacataatttctgaatatgaacgtacaatcagcagtcttgaagaagaaattgtgcaacagaacaagtttcatgaagaaagacaaatggcctgggatcaaagagaagttgacctggaacgccaactagacatttttgaccgtcagcaaaatgaaatactaaatgcggcacaaaagtttgaagaagctacaggatcaatccctgaccctagtttgccccttccaaatcaacttgagatcgctctaaggaaaattaaggagaacattcgaataattctagaaacacgggcaacttgcaaatcactagaagagaaactaaaagagaaagaatctgctttaaggttagcagaacaaaatatactgtcaagagacaaagtaatcaatgaactgaggcttcgattgcctgccactgcagaaagagaaaagctcatagctgagctaggcagaaaagagatggaaccaaaatctcaccacacattgaaaattgctcatcaaaccattgcaaacatgcaagcaaggttaaatcaaaaagaagaagtattaaagaagtatcaacgtcttctagaaaaagccagagaggagcaaagagaaattgtgaagaaacatgaggaagaccttcatattcttcatcacagattagaactacaggctgatagttcactaaataaattcaaacaaacggcttgggatttaatgaaacagtctcccactccagttcctaccaacaagcattttattcgtctggctgagatggaacagacagtagcagaacaagatgactctctttcctcactcttggtcaaactaaagaaagtatcacaagatttggagagacaaagagaaatcactgaattaaaagtaaaagaatttgaaaatatcaaattacagcttcaagaaaaccatgaagatgaagtgaaaaaagtaaaagcggaagtagaggatttaaagtatcttctggaccagtcacaaaaggagtcacagtgtttaaaatctgaacttcaggctcaaaaagaagcaaattcaagagctccaacaactacaatgagaaatctagtagaacggctaaagagccaattagccttgaaggagaaacaacagaaagcacttagtcgggcacttttagaactccgggcagaaatgacagcagctgctgaagaacgtattatttctgcaacttctcaaaaagaggcccatctcaatgttcaacaaatcgttgatcgacatactagagagctaaagacacaagttgaagatttaaatgaaaatcttttaaaattgaaagaagcacttaaaacaagtaaaaacagagaaaactcactaactgataatttgaatgacttaaataatgaactgcaaaagaaacaaaaagcctataataaaatacttagagagaaagaggaaattgatcaagagaatgatgaactgaaaaggcaaattaaaagactaaccagtggattacagggcaaacccctgacagataataaacaaagtctaattgaagaactccaaaggaaagttaaaaaactagagaaccaattagagggaaaggtggaggaagtagacctaaaacctatgaaagaaaagaatgctaaagaagaattaattaggtgggaagaaggtaaaaagtggcaagccaaaatagaaggaattcgaaacaagttaaaagagaaagagggggaagtctttactttaacaaagcagttgaatactttgaaggatctttttgccaaagccgataaagagaaacttactttgcagaggaaactaaaaacaactggcatgactgttgatcaggttttgggaatacgagctttggagtcagaaaaagaattggaagaattaaaaaagagaaatcttgacttagaaaatgatatattgtatatgagggcccaccaagctcttcctcgagattctgttgtagaagatttacatttacaaaatagatacctccaagaaaaacttcatgctttagaaaaacagttttcaaaggatacatattctaagccttcaatttcaggaatagagtcagatgatcattgtcagagagaacaggagcttcagaaggaaaacttgaagttgtcatctgaaaatattgaactgaaatttcagcttgaacaagcaaataaagatttgccaagattaaagaatcaagtcagagatttgaaggaaatgtgtgaatttcttaagaaagaaaaagcagaagttcagcggaaacttggccatgttagagggtctggtagaagtggaaagacaatcccagaactggaaaaaaccattggtttaatgaaaaaagtagttgaaaaagtccagagagaaaatgaacagttgaaaaaagcatcaggaatattgactagtgaaaaaatggctaatattgagcaggaaaatgaaaaattgaaggctgaattagaaaaacttaaagctcatcttgggcatcagttgagcatgcactatgaatccaagaccaaaggcacagaaaaaattattgctgaaaatgaaaggcttcgtaaagaacttaaaaaagaaactgatgctgcagagaaattacggatagcaaagaataatttagagatattaaatgagaagatgacagttcaactagaagagactggtaagagattgcagtttgcagaaagcagaggtccacagcttgaaggtgctgacagtaagagctggaaatccattgtggttacaagaatgtatgaaaccaagttaaaagaattggaaactgatattgccaaaaaaaatcaaagcattactgaccttaaacagcttgtaaaagaagcaacagagagagaacaaaaagttaacaaatacaatgaagaccttgaacaacagattaagattcttaaacatgttcctgaaggtgctgagacagagcaaggccttaaacgggagcttcaagttcttagattagctaatcatcagctggataaagagaaagcagaattaatccatcagatagaagctaacaaggaccaaagtggagctgaaagcaccatacctgatgctgatcaactaaaggaaaaaataaaagatctagagacacagctcaaaatgtcagatctagaaaagcagcatttgaaggaggaaataaagaagctgaaaaaagaactggaaaattttgatccttcattttttgaagaaattgaagatcttaagtataattacaaggaagaagtgaagaagaatattctcttagaagagaaggtaaaaaaactttcagaacaattgggagttgaattaactagccctgttgctgcttctgaagagtttgaagatgaagaagaaagtcctgttaatttccccatttactaaaggtcacctataaactttgtttcatttaactatttattaactttataagttaaatatacttggaaataagcagttctccgaactgtagtatttccttctcactaccttgtacctttatacttagattggaattcttaataaataaaattatatgaaattttcaactt

SEQ ID NO: 159 - DNA, 5173 bp, Homo sapiens
  ref <308>: DATABASE ACCESSION NUMBER: U38847
  ref <309>: DATABASE ENTRY DATE: 2001-06-18
atggagtgggtgctcgcggaagcgctgctctcgcagagccgggacccccgggccctgcttggggcgctgtgccaaggggaggcatccgcggagcgcgtggagacgctgcgcttccttctgcagcggctcgaggacgaggaggcgcgcggcagcgggggcgcaggcgcgctcccggaggcggcgcgcgaggtggctgcagggtacctcgtgccactgctgcggagcctgcgcggacgccccgcgggcggcccggaccccagtctgcagcctcgccaccgccggcgcgtgctgagggcggcgggcgcggccctgcgctcgtgcgtccgcctggccgggcgtccgcagctggcggccgcgctggctgaggaggcgctgcgcgatctgctcgccgggtggcgcgcgcctggcgccgaggctgccgtggaagtgctagcagccgtcgggccatgtttgcggccccgcgaggacgggccgctactggagcgggtggcggggaccgccgtcgccctggcgctgggcgggggcggggacggggatgaggccgggcctgccgaggacgcggcggcgctggtggccgggcgactgctgccagtgctggtccaatgtggcggggcggcgctgcgggccgtgtggggcgggctggccgcgcctggggcgtccctggggtccggccgcgtagaggagaagctgctggtcctgagcgccctggccgagaagctgttgcccgagcccggcggcgaccgcgcccgcggcgcgcgcgaggcgggcccggacgcccggcgctgctggcgcttctggaggacggtgcaggcggggctgggccaggcggacgccctgacgcgcaagcgagcgcgctacctgctgcagagggcggtggaggtgtcggcggagctgggggccgactgcacctgcgggccccaggaaggaaacggcccaagtctgttttggtggtctgagaggaaaaaagatgagcttctaaagttttgggaaaattatattttaattatggagactttagaaggaaatcagatacatgttataaagccagttttaccaaagctaaacaatctgtttgaatatgcggtgtcagaggaaaatggatgttggctctttcacccatcctggcatatgtgtatttataaaagaatgtttgaaagtgaaaacaaaatcctgtccaaagaaggtgttatccattttttggagctgtatgaaacaaagattcttccattttcaccagaattttctgagtttattattggaccattaatggatgcgctttcagagagctctctgtatagcaggtccccaggccagccaataggaagctgttctccattgggactgaaattacagaagtttttagtcacttatatttctcttcttccagaagaaataaagagtagcttcctattgaagtttattcggaagatgacaagtaggcattggtgtgctgttcccattttgtttctatctaaggctttggcaaatgtcccaagacataaggccctgggtatagatgggcttcttgctctcagggatgttattcattgcactatgatcacacatcagattctcctgagaggggcagcccaatgctaccttcttcaaacagctatgaatttgctagatgtggagaaagtgtcactttctgatgtctcaacttttctcatgtctctgagacaagaggaatccttaggacgaggaacttcattgtggacagagctgtgtgactggctacgtgttaatgaaagctattttaagccatcccctacgtgtagctccattggacttcacaagacatctttaaatgcttatgtaaagagcattgttcaagagtatgttaagtcatctgcttgggaaacaggagaaaactgctttatgcctgattggtttgaagccaagcttgtttctctgatggtcttgctggctgtggatgtggaaggaatgaagactcagtatagcggaaagcagagaacagagaatgtattgcggatattcttagaccctcttctggatgtgcttatgaagtttagtaccaatgcctacatgcccttgctgaagactgacagatgcctccagctgctgttgaagctgttgaacacatgcaggttgaaaggttccagtgcccaagatgatgaggtgtctactgttcttcagaactttttcatgtctactacagagagcatttctgaatttattctcagaagacttactatgaatgagctaaatagtgtttcagatctggatcgttgccatttatacctgatggtgttaactgagcttataaatctgcatttgaaggttgggtggaaaaggggtaaccctatctggagagttatttctcttttgaaaaatgcatccattcagcatcttcaagagatggacagtggacaggagccaacagttggaagtcagattcagagagtagtgagcatggctgccttggccatggtgtgtgaggccatagaccagaagcctgagctgcagctggactctctccatgctgggcccctggaaagcttcctttcctctcttcagctcaatcagacgctgcagaagccccacgcagaggagcagagcagttatgctcaccccttggagtgcagcagtgttttggaagaatcgtcatcttcccaaggatggggaaaaatagttgcacaatatattcatgatcaatgggtgtgcctctctttcctgttgaaaaaatatcacacccttataccaaccacagggagtgaaattctggaaccgtttctacctgccgttcagatgccaataaggactttgcagtctgcactagaagccctcacagttctttcttctgatcaagttttaccagtgttccattgcttgaaagtgttggttcccaagcttctgacttcctctgaatcactctgcatagagtcttttgacatggcgtggaaaattatatcttctttaagcaacactcagctgatattctgggctaatttaaaagcttttgttcagtttgtttttgataacaaagttcttaccattgctgccaaaatcaagggccaggcatatttcaaaataaaagagattatgtacaagataattgaaatgtctgctataaagactggagtcttcaatacactgataagttactgctgtcagtcttggatagtgtctgcttcaaatgtgtcccaaggatctttatcaagtgctaaaaattatagcgaacttatccttgaggcttgtatatttggaactgtgtttaggcgtgatcaaagacttgttcaggatgtacagaccttcatagaaaaccttggacatgactgtgcggcaaatattgttatggaaaatactaagagagaagaccattatgtgagaatttgtgctgtcaaattcctgtgtttattagatggctccaatatgtcccacaagttgtttattgaggatcttgcaatcaagctattagataaagatgaattagtgtccaagtccaaaaaacgctactatgtgaattctctacagcacagagtgaaaaaccgagtctggcagactctgctggtacttttccctagacttgaccagaatttcttgaatggaattattgacaggattttccaggctggtttcaccaacaatcaagcatccataaaatattttatagaatggattattatattgattcttcataaattccctcaatttcttccaaagttctgggattgtttttcttatggtgaagaaaatcttaaaacaagcatttgtacatttttagcagttttatcacatttagacattattactcaaaatattccagaaaagaaactaattctgaagcaagcccttatagttgtgctgcagtggtgtttcaatcacaattttagtgttcgactgtatgctttagttgctcttaagaaactctggactgtgtgtaaagtgttaagtgttgaagaatttgatgccctgactcctgtgattgaatccagcctccatcaagtggaaagcatgcacggagcagggaatgccaagaagaattggcaacgcattcaggagcatttcttttttgcaacatttcacccactcaaggattattgtctagagaccatattttacatccttccacgcctttcaggccttattgaagatgaatggatcaccattgataaatttaccagattcactgatgttcctttagctgcgggatttcagtggtacctttctcaaactcaacttagtaaactaaaaccaggtgactggtctcagcaagacataggtactaatttggttgaagcagataaccaagcagagtggaccgacgttcagaagaagattatcccgtggaacagtcgtgtttccgacttagacctggagctcctgtttcaggatcgtgctgccagacttggaaagtcaattagtagactcatcgttgtggcctcgctcatcgacaaaccgaccaatttaggaggactgtgcaggacctgtgaggtatttggggcttcagtgctcgttgttggcagccttcagtgtatcagcgacaaacagtttcagcacctcagtgtctctgcagaacagtggcttcctctagtggaggtaaaaccacctcagctaattgattatctgcagcagaagaaaacagaaggttataccatcattggagtggaacaaactgccaaaagtttagacctaacccaatattgctttcctgagaaatctctgctcttgttgggaaatgaacgtgagggaattccagcaaatctgatccaacagttggacgtttgtgtggaaattcctcaacagggcattatccgctccctgaatgtccatgtgagtggagccctgctgatctgggagtacaccaggcagcagctgctctcgcacggagataccaagccatgatgtgccttccttagtgaactgctgctgctgttcagacttttttaaaaaaaactatttggactaaagaaacagattctgaaatttattgtgataatttgtatttcttttttcttgcaatttaatgccaaaagtttgccatgtgccttaaacatattactatatattttcccctttaataaacactttttgttaaattgtattcttcctttaataaaatattttaagcaattgtccaataaaaaaaaaaaaaaaaaaaaaaaaaaaaaaaaaaaaaaaaaaaaaaaaaaaaaaaaaaaaaaaaaaaaaa

SEQ ID NO: 160 - DNA, 5808 bp, Homo sapiens
  ref <308>: DATABASE ACCESSION NUMBER: AB014523
  ref <309>: DATABASE ENTRY DATE: 2001-06-18
gcgcgcgcgagggcgttgggcgccgccgcgaggcggggaagcgcggggccgcggcggtgcgggttctagggcggcggccgtcgccgtcgcagcagcgccccgagcggggagggccgaggaggcccgacgagctggggatggagagtaccgggcccctcactgcctcagagcgcgtgtgcggctctgggcgcgcacagtgacggtgacggcacccctggcccggcagcgccgaggccgcttcgccagacagccagcggccggcggcaggccgggccatgagcggcaggggccgggccgggcctcgctgaccctggctccgcgcggcagcttccccagtttccgctccggtctctcggcatgagagtccgcccgggcccggggctgcggctgccccagacccgccgcacgctggcgcgctccgggcccgcggagccgcggtgctgatacctgcgccgcactgcgccgcccgcccgtccgctgtgtgccccgggggcgcggccatggaggtggtgggtgacttcgagtacagcaagagggatctcgtgggacacggggccttcgccgtggtcttccgggggcggcaccgccagaaaactgattgggaggtagctattaaaagtattaataaaaagaacttgtcaaaatcacaaatactgcttggaaaggaaattaaaatcttaaaggaacttcagcatgaaaatattgtagcactctatgatgttcaggaattacccaactctgtctttttggtgatggagtattgcaatggtggagacctcgcagattatttgcaagcgaaagggactctcagtgaagacacgatcagagtgtttctgcatcagattgctgctgccatgcgaatcctgcacagcaaaggaatcatccacagagatctcaaaccacagaacatcttgctgtcctatgccaatcgcagaaaatcaagtgtcagtggtattcgcatcaaaatagcggattttggttttgctcgttacctacatagtaacatgatggctgcaacactgtgtggatccccgatgtacatggctcctgaggttattatgtctcaacattatgatgctaaggctgacttgtggagcataggaacagtgatataccaatgcctagttggaaaaccaccttttcaggccaatagtcctcaagacttaaggatgttttatgaaaaaaacaggagcttaatgcctagtattcccagagaaacatcaccttatttggctaatctccttttgggtttgcttcagagaaaccaaaaagatagaatggactttgaagcgttttttagccatccttttcttgagcaaggtccagtaaaaaaatcttgcccagttccagtgcccatgtattctggttctgtctctggaagctcctgtggcagctctccatcttgtcgttttgcttctccaccatcccttccagatatgcagcatattcaggaagaaaacttatcttccccaccattgggtcctcccaactatctacaagtttccaaagattctgccagtactagtagcaagaactcttcttgtgacacggatgactttgttttggtgccacacaacatctcgtcagaccactcatgtgatatgccaatggggactgctggcagacgtgcttcaaatgaattcttggtgtgtggagggcagtgtcagcctactgtgtcacctcacagcgaaacagcaccaattccagttcctactcaaataaggaattatcagcgcatagagcagaatcttacatctactgccagctcaggcacaaatgtacatggttctccaagatctgcagtggtacgaaggtccaacaccagccccatgggcttcctccggccgggatcatgctccccagtaccagcagacacagcacagacagttggacgaaggctctccactgggtcttctaggccttactcaccttcccctttggttggtaccattcctgagcaattcagtcagtgctgctgtgggcatcctcagggccatgactccaggagtagaaactcctcaggttctccagtgccacaagctcagtccccacagtctctcttatcgggtgctagactgcagagcgcccccaccctcactgacatctatcagaacaagcagaagctcagaaaacagcactctgaccccgtgtgcccatcccatactggggctgggtacagctactcgcctcagcccagtcggcctggcagccttggaacttctcccaccaagcacttggggtcctctccacggagttctgactggttctttaaaactcctttgccaacaatcattggctctcctactaagaccacagctcctttcaaaatccctaaaactcaagcatcttccaacctgttagccttggttactcgtcatgggcctgctgaagaacagtcgaaagatgggaatgagccacgggaatgtgcccattgcctcttagtgcaaggaagtgagaggcagcgggccgagcagcagagcaaggcagtgtttggcagatctgtcagtaccgggaagttatcagatcaacaaggaaagactcctatatgtcgacatcagggcagcacagacagtttaaatacagaacgaccaatggatatagctccggcaggagcctgtggtggtgttctggcacctcctgcaggtacagcagcaagttccaaggctgtcctcttcactgtagggtctcctccacacagtgcggcagcccccacttgtacccacatgttccttcgaacaagaacaacctcagtggggcccagcaactccgggggctctctttgtgccatgagtggccgcgtgtgcgtggggtccccgcctggcccaggcttcggctcttcccctccaggagcagaggcagctcccagcctgagatacgtgccttacggtgcttcaccccccagcctagaggggctcatcacctttgaagcccctgaactgccggaggagacgctgatggagcgggaacacacagacaccttacgccatctgaatgtgatgctgatgttcactgagtgtgtgctggacctgacagccatgaggggaggaaaccctgagctgtgcacatctgctgtgtccttgtaccagatccaggagagtgtggtggtggaccagatcagtcagctgagcaaagactgggggcgggtggagcagctggtgttgtacatgaaagcagcacagctgcttgcggcttctctgcatcttgccaaagcccagatcaagtccgggaaactgagcccatccacagctgtgaaacaagttgtcaagaatctgaacgaacgatataaattctgcatcaccatgcgcaagaaacttacagaaaagctgaatcgattcttctctgacaaacagaggtttattgatgaaatcaacagtgtgactgcagagaaactcatctataattgtgctgtagaaatggttcagtctgcagccctggatgagatgtttcagcagaccgaagatattgtttatcgctatcataaggcagcccttcttttggaaggcctaagtaggattctacaggaccctgcagatattgaaaatgtgcataaatataaatgtagtattgagagaagactgtcggcgctctgccatagcaccgcaaccgtgtgagcagcaggctcatcccgtggaccggtggtgggaacgtgaggtgatgcctttgggattacagcttgagttctgtcaccccatccccaggaaactgtagcttcttaactggtgactaccaaagaacaagcagtgatttgaaaaaggaaaaacaatccaaaaactacatatttgtaggaaatctgccttattggagaaaatcaccctttccctttttctttgtagaagcaggagcaagagtgtttggctcccagtttggacttggtgaataaatgtaccttagaactaggataatcggtacagttattcttaaagataattaaaaatgaaacaaagtgagtgctcgtcactgggttcatcagagcagtgtgtgaaattccatgtgtttgctgaggtgtaaaggtaaatgtattcacccctcatccaggcagtttgatatttggagtaagtttgtttaaatctgagcatgcatctttaaacagctcaggaagaaatagcttaagaagaagtgaaacatggatcttggaagaaattttgaaatcttcaatttgatcctaatatggatacatgttaatcttccaaaatctttcatattgcactaatttattaaaacaactgtgtattggattttgtaatttaactaaggcacaatggacttgtttaaaatattttacttgattgtatacatagaccctttccagaattcacatgtaatctccagtgaacttttaagtggttaaaacttgtattcatgtgaacctttgcacatttttttttttttacttctttatctacacctacagattttctcagtaatgtttttgttagcttttggttccattttttattgtgcatgcagaatgtacattgatgcctgtgaccttaggtttattaaaggctaggtttatttgggcagtattagaaacaaaatcatggatcaagagatactcttgataatttgaatagggccaaaacaaagttggtgacctaaaggcttgttagtgatgtggagttcctacatgcagtgagtggaaaatgaagttcgttttctcttaggaaaatgggcagctgtcttctgcctaatgtgtatttttcatgttaattctgacagttcaccaaatagctagtcatggagaatgcaggcagttaacttaatatccctccaggaatggttcctacgttgtgtattatttggtttcttttacttacctgcttgaatacttgaataaaccattcaccaattttaatccttttattttaatccttttacataaaataatctgaactctttgacaaattgcacagagctctttggcattaatctaattttaatgtactgataaaaacaaacatggttgtcctttactttgacaaagtaatgtaatttttaccttatttatctgtatgaaattccagtagttaatttgaacatttatttatatgacgtttgtatttttaggtctttaatacagtgtttctacctctcatttgtaactgcatgcattattcttgaaactaggtaaaactcactgaattgttgtgtaatagcctttttattattgcctgtacaaatgtatattaaggtaaaataaaactgacaaagtgtttctagggtgtagctgggtacatattaagtggcttgttgagccaggtacttccttagtgagtttagagacttggccatgaatatcctttgtcctgccccaggatttagatcttggctactgtcatgcaggcttccaggaacatagactgttttacctccacaaccctatttgttattagtgatactttattttatataatattttttattcacagtgaaatttcattcatgttctttcagttatcacctgtgttatctcagttgtaggtttattctatcctctcctcttcctctcccatttcttttttaacacaggatgaaacaggttcagagaggggaagtgattggcctaaagtcaggaactaggcaagtggtcaagccatgctttgtgactttcaagttaattcttcttgttcttgtatattaaaggtcttggggtagatggtgtgtgtgaaacagtgaagtctcaacagcagaaaagaacaaaatgtaaattcatgaataatggttctggttatacttccattatcaaggctaattaagagattttgccttgagtatagcaataataaacaaatgctttatgtttccctg

SEQ ID NO: 161 - DNA, 6942 bp, Homo sapiens
  ref <308>: DATABASE ACCESSION NUMBER: D79988
  ref <309>: DATABASE ENTRY DATE: 2001-06-18
ggcatggaacctaaagactagaggcggttgtgtgagtcaggaagaggggccagatatctgagtgttcctctttagtttcttcaattgcagataatatggtgtctaattttatgttgttcaggaaagacagtggttcctgactcaggaagacagtctcagaaacatgtggaatgatattgagctgctaacaaatgatgataccggaagtgggtacctgagtgtcggttcaagaaaagaacatggaactgctttatatcaagtagatttgctagtgaagatctcttctgaaaaggcctcattaaatccaaagatacaggcatgcagcttaagtgatgggtttattattgtagccgaccaatcagtgatattgcttgacagtatttgtagatcacttcaattgcatcttgtctttgatactgaagtggatgtagttggcctttgtcaagaaggaaagtttcttttggttggcgagagaagtggcaacctacatcttattcatgtaacatcaaaacaaacactactcactaatgcatttgttcagaaagctaacgatgaaaatcggcggacttaccagaatcttgtcattgagaaggatggttcaaatgaaggtacctattatatgctacttcttacatacagtggatttttttgtattacaaaccttcagcttttaaaaattcaacaagcaattgagaatgtagacttcagtacagcaaaaaagttacaaggacaaatcaagtccagttttatttctactgaaaattatcatactcttggttgtctcagtcttgtggctggagatttagcaagtgaagttcctgtgataattgggggaaccggtaattgtgcattctcaaaatgggaaccagattcttccaagaaaggaatgacagttaagaaccttattgatgcagagattattaaaggtgcaaagaagttccagctgatagacaatctactttttgttcttgatactgataacgtgctgagtttatgggatatttacactctaactcctgtatggaactggccctctcttcacgtagaagagtttcttcttactacagaagcagactctccttcatcagtcacgtggcaaggaattacaaatctcaaattaatagctctgacagcttcagctaataagaagatgaaaaacctcatggtttattcattacctacaatggaaatactatattctttggaagtatctagtgtttcttctctggtccaaacaggaattagcacagataccatataccttttagaaggagtttgcaaaaatgatccaaaattgtctgaagactcagtctctgtgttagtactcagatgtcttacggaagctttaccagaaaacagattgagtcggttacttcacaaacacagatttgctgaagctgagagttttgccattcagtttggactagatgttgagcttgtttacaaggtcaagtcaaatcatatattggagaaactggcattgagttctgtggatgccagtgaacagaccgaatggcaacaacttgtagacgacgctaaggaaaatctacataagatccaggatgatgaatttgtggtgaattactgcctgaaagctcagtggataacctatgaaaccactcaagagatgctgaattatgccaaaaccaggcttttgaagaaagaagataaaactgctctcatttattctgatggcttgaaagaggtgctaagagctcatgcaaaattgactactttttatggagcatttggaccagaaaaattcagtggcagttcttggattgaatttctaaataatgaagatgatcttaaagatatttttttacagctaaaagaaggaaaccttgtttgtgcacagtatctttggcttcgacatcgggcaaactttgaaagcagatttgatgtgaaaatgctggagagcttgctcaactcaatgtctgcatcagtctctttgcaaaagctgtgtccatggtttaaaaatgatgtgattccatttgtaagaaggactgtgcctgaaggacagataattcttgcaaaatggttggaacaagcagccaggaaccttgaattaactgataaggcaaattggccagaaaatggacttcaattggcagagatattttttacagcagaaaaaacagacgagttgggattggcatcttcctggcattggatttccttgaaagattatcagaacacagaggaagtatgtcagctaaggactttggtaaataacttgcgagagttgatcacgttgcataggaagtacaactgcaaattagccctctctgattttgagaaggaaaatacaaccaccatagtgttccgaatgtttgataaagtgctggccccagagcttattccctccatcttagagaagtttataagagtttacatgagagaacatgacttgcaagaggaggaacttctcttgctgtacatagaggatttactgaatagatgcagctcaaagtccacatcactctttgaaacagcatgggaagcaaaggccatggcagtaatagcgtgtttatctgacacggacctcatatttgatgccgtgctcaagatcatgtatgcggcagtggttccttggagtgcagctgtggagcaactggtgaaacagcacctggaaatggaccatcccaaagtcaagttattacaggaaagttacaaactaatggagatgaaaaaacttttacgaggctatggaataagagaggtaaatctcttaaacaaggaaataatgagagtggttagatacattctcaaacaagatgtcccatcttctttagaagatgctttaaaggtagcccaagcgtttatgttatctgatgatgagatctacagtctaagaattattgacctgattgatagagaacagggtgaagactgtctccttctgttgaagtctttgcctcctgctgaagctgagaaaactgcagaaagagtcatcatatgggcacgactggcattacaagaagagccagatcattctaaagagggcaaggcctggagaatgtctgtagcgaagacatccgtggacattcttaagatactatgtgacattcagaaagacaatctgcagaagaaggacgaatgtgaagaaatgttgaaactatttaaagaggttgctagcttacaggagaactttgaggtctttctttcatttgaagattatagcaatagttccctggtagcagatctccgtgagcagcacattaaagctcacgaagttgcacaggcgaaacacaaacctgggagcaccccagagcccatagctgctgaggtgaggagcccaagcatggaatcaaagctgcacagacaggcactggccctgcagatgtccaaacaagagctggaggcagagctgaccttgagagccttaaaagatgggaacatcaaaacagcactgaaaaaatgcagcgacttgtttaagtatcactgcaatgctgacactgggaaattgctatttctgacatgtcagaagctttgtcagatgttggctgataatgtcccagtgacagtgcctgtgggactgaatcttccttccatgatacatgatctagcaagccaagctgccaccatttgcagtccagattttttactagatgctttagaactatgtaaacatactttaatggctgtagagctttccagacaatgccaaatggatgactgtggaatcctcatgaaagcttcttttgggacacataaagatccatatgaagagtggtcttacagtgacttcttcagtgaagatggaattgttcttgagtcacagatggtgcttccagtgatttatgaactgatttcatctcttgtgcctctagctgaaagcaagagatatcccttggagtctaccagtttgccatactgctcccttaatgaaggagatggccttgttttacctgttataaattccatctctgccctgcttcagaatcttcaggaatctagccagtgggagctagccctaagatttgtggttggttcatttggtacctgtcttcagcactctgtgtcaaacttcatgaatgccactttgagtgaaaagttatttggagagactacattagttaaatcaaggcatgttgttatggaattgaaagaaaaagctgttatatttatcagggaaaatgctacaacactactgcacaaagtatttaattgtcgcttggtagatcttgacctggcgttgggttactgcactctcttacctcaaaaagatgtgtttgaaaatctctggaagctcatagataaagcatggcagaattacgacaaaatcttggcaatatctctggtgggctctgagctggcaagtctctatcaggaaatagaaatggggcttaagttccgtgaactcagtactgatgcccagtggggcattcgtcttggtaaacttggtatttcttttcaaccagttttcaggcaacattttctcaccaagaaagacctcattaaagctcttgtggagaatatagatatggacacaagcctcattttggaatattgcagcacatttcagttggactgcgatgcagttcttcagctcttcattgaaacgctgctccacaacacaaatgccggccaaggccagggagatgcaagcatggactctgcaaagcggcggcatcccaaactcctggccaaagcccttgagatggttcctttactgacgagcacaaaagatttggtcatcagtcttagtggaatactacataagctggatccttatgactatgaaatgattgaagttgtcttgaaagttatagaacgagctgatgaaaagataaccaatattaatattaatcaggcattgagtattctgaaacatttgaagtcatacagaagaatttctcctcccgtggatctagaatatcagtatatgttggaacatgtcataactttgccatcagctgcccaaactagactgccttttcacctgatattctttggcacagcacagaacttctggaaaattctctctacagaactcagtgaagaatctttcccaacattgctcttaatttcgaaattaatgaagttctctctggacactctgtacgtgtctacagcaaaacacgttttcgaaaaaaaactgaagccaaagctcctgaagttaacacaagctaaatcctcaacactgattaacaaggaaataactaagatcacgcagaccatcgaatcctgcttactctctatagtcaacccagagtgggctgtagctattgccatcagccttgcccaggatatccctgaaggttccttcaagatatctgctttgaaattctgcctttatttagctgagagatggctacagaatatcccatcgcaggacgaaaaacgtgaaaaagccgaggctttgttgaagaagcttcatatccagtaccggcgatcgggcacagaagctgtgctcatagcccacaagctgaacactgaggaatatttaagagtgatcggaaagccagcacatcttattgtcagtctctacgaacatcctagcatcaatcaaagaattcagaattcatctggcacagattatcctgatattcatgcagcagctaaagaaatagccgaagtcaatgaaattaatttggaaaaagtctgggacatgttgttggaaaaatggctatgcccttcaacaaaacctggtgaaaaaccatcagaattatttgaacttcaagaagatgaagccctacgaagagtgcagtatctcctcctgtctcgtccaattgattatagttcaagaatgctgtttgtatttgcaacatcaactacaaccacattaggtatgcatcagttaacttttgcccatagaactcgagctcttcagtgtctcttctatttggctgacaaggaaactatagaatctctctttaaaaaacccattgaagaagtgaaatcttatttgagatgtataacttttctggcatcatttgagactttgaatatccccatcacatatgaattattttgcagcagtcctaaagaaggaatgattaagggtctgtggaaaaaccacagccacgagtccatggcagtaagattggtgactgagctgtgtttagaatacaaaatctatgacctgcagctttggaatggactcttgcaaaagcttctgggcttcaatatgattccttatctaaggaaagttttaaaagccatctccagtatccattctttatggcaggttccctacttcagcaaagcgtggcagcgtgtgatacagataccactgctttcagcctcttgtcctttaagtcctgatcagctgtcagattgttctgagagtctcatcgctgtcctcgaatgtccagtctcaggtgatcttgacctgatcggagtcgccaggcagtatatccagttagaacttccggcttttgcattagcttgtctgatgctcatgccccactcagagaaaagacaccagcaaattaagaattttctgggttcctgtgaccctcaggttattttaaagcaattggaagagcatatgaacacgggccagctagcaggattttcacatcaaattagaagtctgattttgaataatatcatcaataagaaggagtttgggattttggcaaagaccaaatactttcaaatgttgaagatgcatgcgatgaataccaacaatatcactgagctagtgaactatttggcaaatgacttaagtttagatgaagcttcagtcttgataactgaatattcaaagcactgcgggaaacctgtgcctccagacactgctccctgtgaaattctgaagatgtttcttagtggattatcgtaaatcactgaacctttttttcaagaaggacaagaattttggagtctgctattaatggaccatatttattacagtttttaaattgtacaatctctgtattatagctatttgtctaacattaccccacatgtaataaataaaacaatatgagc

SEQ ID NO: 162 - DNA, 2811 bp, Homo sapiens
  ref <308>: DATABASE ACCESSION NUMBER: X82200
  ref <309>: DATABASE ENTRY DATE: 2001-06-18
gaattcggcacgagctcttctcccctgattcaagactcctctgctttggactgaagcactgcaggagtttgtgaccaagaacttcaagagtcaagacagaaggaagccaagggagcagtgcaatggatttctcagtaaaggtagacatagagaaggaggtgacctgccccatctgcctggagctcctgacagaacctctgagcctagattgtggccacagcttctgccaagcctgcatcactgcaaagatcaaggagtcagtgatcatctcaagaggggaaagcagctgtcctgtgtgtcagaccagattccagcctgggaacctccgacctaatcggcatctggccaacatagttgagagagtcaaagaggtcaagatgagcccacaggaggggcagaagagagatgtctgtgagcaccatggaaaaaaactccagatcttctgtaaggaggatggaaaagtcatttgctgggtttgtgaactgtctcaggaacaccaaggtcaccaaacattccgcataaacgaggtggtcaaggaatgtcaggaaaagctgcaggtagccctgcagaggctgataaaggaggatcaagaggctgagaagctggaagatgacatcagacaagagagaaccgcctggaagatcgagagacagaagattctgaaagggttcaatgaaatgagagtcatcttggacaatgaggagcagagagagctgcaaaagctggaggaaggtgaggtgaatgtgctggacaacctggcagcagctacagaccagctggtccagcagaggcaggatgccagcacgctcatctcagatctccagcggaggttgacgggatcgtcagtagagatgctgcaggatgtgattgacgtcatgaaaaggagtgaaagctggacattgaagaagccaaaatctgtttccaagaaactaaagagtgtattccgagtaccagatctgagtgggatgctgcaagttcttaaagagctgacagatgtccagtactactgggtggacgtgatgctgaatccaggcagtgccacttcgaatgttgctatttctgtggatcagagacaagtgaaaactgtacgcacctgcacatttaagaattcaaatccatgtgatttttctgcttttggtgtcttcggctgccaatatttctcttcggggaaatattactgggaagtagatgtgtctggaaagattgcctggatcctgggcgtacacagtaaaataagtagtctgaataaaaggaagagctctgggtttgcttttgatccaagtgtaaattattcaaaagtttactccagatatagacctcaatatggctactgggttataggattacagaatacatgtgaatataatgcttttgaggactcctcctcttctgatcccaaggttttgactctctttatggctgtgctccctgtcgtattggggttttcctagactatgaggcaggcattgtctcatttttcaatgtcacaaaccacggacgactcatctacaagttctctggatgtcgcttttctcgacctgcttatccgtatttcaatccttggaactgcctagtccccatgactgtgtgcccaccgagctcctgagtgttctcattcctttacccacttctgcatagtagcccttctgtgagactcagattctgcacctgagttcatctctactgagaccatctcttcctttctttccccttcttttacttagaatgtctttgtattcatttgctagggcttccatagcaaagcatcatagattgctgatttaaactgtaattgtattgccgtactgtgggctgaaatcccaaatctagattccagcagagttggttctttctgaggtctgcaaggaagggctctgttccatgcctctctccttggcttgtagaaggcatcttgtccctatgactcttcacattgtctttatgtacatctctgtgcccaagttttccctttttattaagacaccagtcatactggcctcagggcccaccgctaatgccttaatgaaatcattttaacattatattgtgtacaaagaccttatttccaaataagataatatttggaggtattgggaataaaatttgaggaaggcgatttcactcataacaatcttaccctttcttgcaagagatgcttgtacattattttcctaataccttggtttcactagtagtaaacattattattttttttatatttgcaaaggaaacatatctaatccttcctatagaaagaacagtattgctgtaattccttttcttttcttcctcatttcctctgccccttaaaagattgaagaaagagaaacttgtcaactcatatccacgttatctagcaaagtcataagaatctatcactaagtaatgtatccttcagaatgtgttggtttaccagtgacaccccatattcatcacaaaattaaagcaagaagtccatagtaatttatttgctaatagtggatttttaatgctcagagtttctgaggtcaaattttatcttttcacttacaagctctatgatcttaaataatttacttaatgtattttggtgtattttcctcaaattaatattggtgttcaagactatatctaattcctctgatcactttgagaaacaaacttttattaaatgtaaggcacttttctatgaattttaaatataaaaataaatattgttctgattattactgaaaagatgtcagccatttcaatgtcttgggaaacaattttttgtttttgttctgttttctttttgcttcaataaaacaatagctggctctaaaaaaaaaa

SEQ ID NO: 163 - DNA, 4522 bp, Homo sapiens
  Modified_base 1 ... 4522: n = a,c,g, or t
  ref <308>: DATABASE ACCESSION NUMBER: X89984
  ref <309>: DATABASE ENTRY DATE: 2001-06-18
cgggtctcagtctggtactgaatgcaggaatggcttaaggtgaaatcgtggtcctctggtgaactcagcgaagaccccctcgccttgtttatgacaagagaacttctgggggcgggaggaagagtccctgttacgatgctgatcatcattgagcttttgctgagaaaactctttagtactaaggtcgagagtctctgtggtctgcctggcaccagcaccttcctacaaccctagttttccaaaaggaaaagcctggggccaggcgacgtcctagctcgcattatgacagggccgcgggccaccagagatgcgcgatgcccaactctttccaagagcacctcgcgtcccgaaccggtgccttcaactcggagaagtcaagagacccgcaagaaacttgcacgactgcacccgccgccgcgctgctgggggctgggcaggggcagctgggctggctcccggggagacgcgacccccccgcgccccgcagaccggctgtctcccatggacccctcggcacctgcagctccgaggaagggtcagcgcgcgtgtccgcaccccgcccccaccgcgcgcccagagccgggggtcgccgtggcccttcgccacctccccaggagggcgtccggggcgtcccctctgggcgacgcgaggcccgggggnctgcggtggccgcggcgcggagccnnactccggcggcggcggcggcgcggctccccctgctctgtgcagctgccgcccgggcttgcgctgggccaggcgcgcggcggccccgggctttgtgtgtgtgtatgtgtgtgtgtgtgtgtgtgtgtgtgtgtgagagtgtgtgcgtgtgagagtgcgagtgtctgtgcgcgagtgagtgagcggcgggcgggcgcgagtgtggccggccggagcgcgagcatgacccggcgggcgcgctccccagcctccgtctccccgccggaaccatgtcgggcaggtcggttcgagccgagacgaggagccgggccaaagatgatatcaagagggtcatggcggcgatcgagaaagtgcgcaaatgggagaagaaatgggtgaccgttggtgacacatccctacgaatctacaaatgggtccctgtgacggagcccaaggttgatgacaaaaacaagaataagaaaaaaggcaaggacgagaagtgtggctcagaggtgaccactccggagaacagttcctccccagggatgatggacatgcatgacgataacagcaaccagagctccatcgcagatgcctcccccatcaaacaggagaacagcagcaactccagccccgctccagagcccaactcggctgtgcccagcgacggcaccgaggccaaggtggatgaggcccaggctgatgggaaggagcacccaggagctgaagatgcttctgatgagcagaattcacagtcctctatggaacattcgatgaacagctcagagaaagtagatcggcagccgtctggagactcgggtctggccgcagagacgtctgcaatctctcaggtacctcgctcgaggtctcagaggggcagccagatcggccgggagcccattgggttgtcgggggatctggaaggagtgccaccctctaaaaagatgaaactggaggcctctcaacaaaactccgaagagatgtagacgatgctttaagcctccgataactgttccatggaaggtacatcagcaattaattctagagcaactttgccccagcgattcctcttgggtgcgaacagaactactaacgtttcaagtttaccaagtgcaaatccaagaagacccagacggcgtcacttctcagacactgaagaactctgctgtgaagcaaaacactcaaacctttaagggactgtccttggggaggcaggcggggctgacagctcaggagtgtctgcacactgtctcggaagccaggattccatttgtgttgctgctgtatttccccccacttctctatgtaacgatataagctatcggagggtggtaccgatcaggaacgctttttggcggggctttccactgttcaaccgattccttccgctttctttttttgtgccttgtgcccttgaggtgacctctggcatgtatcctggtggttcttacatccccctctgcaaagtgccctcttggtttggttcgggcggcggctgccaccctactcaccgctctcctccctgccccaggacttcatcggagcaggcagggtggagcgaaggagctccttagcccacctggtttgcaggtgcagggggaccttaggcacgccccaagcaccaggcaccagggcccaaggacgcgcaggtgttggggcacagtccccaagggctcggccccttggatcaggctgggcactcgctgtgctctcccctccttggggcgtttaggactgggcgtctccaagcccaccatggcccagatggacgtgcaaagcccttggaattttctggcacttcctctctattgcccccaccaccaccacccccatcactgctttctcccagacctccgaatacgaaatggcttctctggctgactgcaaggctgtctccttaaggcactgagtgggccggggaggctgggagccggcggcaggattagctggtgctgaactttctctcataggacgtcgcttggatttcaaatccacggtcacctgctgccctttgcctcccccgacgccccagcctgtgccccggagaggcaggatcgcagtggtcagaatccacgtgctttcctattctcaggctgttctgactctgagccaacagctggaccgtgtctcatccccagaacatgccgtctgtccaccggggagtggccttgatggccggcctcgaaggccacaaacaaggcgtcgaggaattggaaagatttgcacaccctccagaaaggagagacgcaatctcccctccctcccatcccccaccttcgctggaacagcttcctctcactgaacggagacgcccccttggacgaactgcctaatcgtttggttctgaggcctggtttgctcttaattaatatatgaactcctcagaccttaaaccttttcctaagctttctttactgcactggagttctgactccctttgagttgtgtgttactgggggtggggtggggtcatgggttttgttgtttttgggggctaattggtgcatattcaggtaccacctttgacgtgtggctctttctcctgaccatcatgggaagtgtctgctggattccattttctaagagtttctgagggtgaggctcttattttttttttaagggatcctgtctatttcctgcacttcgagaagaatcaaaatgttcctgaatttcaaatacctcatgcaaaatgtgtctcctgaaataagggaaaaaaaaaaaaaaccacaactttgaaaatcttaatgttgaagttagcaatgccgaaaggtttctgtcttaaaaaaaaaaaatccttgtacttatcaattttgccccttaggcagtcagttttgttgagaactgtgtcctgcatcctggcgcagaacctcctgatgcggttcctctccacgcatctcgaggcggcgttacctccagattccgtagagttagagtcacatttttctttgcagcgaaactccgtcttggtgagagatgaatttggatatttatttccttctctgtttttgggaaacgagaggctacaaccaagacagctgaaggagaatgaaacacacatccacagaaacagagaggcgtaggtggccctgccgttgaccgcagcctctctggacaggcaaggggagttggcgcaggtgaggactcagacgacgtccaccgtcccaaggctgtcactagtatttctctgaagtgcctgaaggtaggaatgggccggcgattgggaccagctgggccccaccacggccacgccaggcaaagcgccagcagccctgcactccacgctggccaagaaggccttccacgcagaatgacaagactgcaaaaatccgatgtgcttccttccctggcgcagtcgctcctcgagccgctgccccccacccaccctgcacccctcgccctcccccccaccacagaatctaagacctttcagcttcgagccagggggcgggggatcccgagcaaaagccttccatggacatcaggccccgtggcctcaagggctcccagggcaaacctaattcccccaaaacgtgaagtcggggaagctgcggctacacattccacaaagtgctggcacttacacccacaacccggaaggctgtggaccgattcctctagggtggtgacctcccattagcaaacggtgtcatggtttggaatgttcattatcgccaagaacctggttagaggcataaagaccttttttcaccgttacctaattttttcccctttcaagaattttttttttttttggtgtgttgtacagcagtataatttttcacttatttattcctacagtagatatggtttgtacaatgtacaattgtttcatttcagaaaataaaaatttcaaatcatg

SEQ ID NO: 164 - DNA, 1662 bp, Homo sapiens
  ref <308>: DATABASE ACCESSION NUMBER: L07555
  ref <309>: DATABASE ENTRY DATE: 2001-06-18
caagagctccagcaaagactttcactgtagcttgacttgacctgagattaactagggaatcttgagaataaagatgagctctgaaaattgtttcgtagcagagaacagctctttgcatccggagagtggacaagaaaatgatgccaccagtccccatttctcaacacgtcatgaagggtccttccaagttcctgtcctgtgtgctgtaatgaatgtggtcttcatcaccattttaatcatagctctcattgccttatcagtgggccaatacaattgtccaggccaatacacattctcaatgccatcagacagccatgtttcttcatgctctgaggactgggttggctaccagaggaaatgctactttatttctactgtgaagaggagctggacttcagcccaaaatgcttgttctgaacatggtgctactcttgctgtcattgattctgaaaaggacatgaactttctaaaacgatacgcaggtagagaggaacactgggttggactgaaaaaggaacctggtcacccatggaagtggtcaaatggcaaagaatttaacaactggttcaacgttacagggtctgacaagtgtgtttttctgaaaaacacagaggtcagcagcatggaatgtgagaagaatttatactggatatgtaacaaaccttacaaataataaggaaacgtgttcacttattgactattatagaatggaactcaaggaaatctgtgtcagtggatgctgctctgtggtccgaagtcttccatagagactttgtgaaaaaaaattttatagtgtcttgggaattttcttccaaacagaactatggaaaaaaaggaagaaattccaggaaaatctgcacttgtggcttttattgccatgagctagaagcatcacaggttgaccaataaccatgcccaagaatgagaagaatgactatgcaacctttggatgcactttatattattttgaatccagaaataatgaaataactaggcgtggacttactattaattgctgaatgactaccaacagtgagagcccttcatgcatttgcactattggaaggagttagatgttggtactagatactgaatgtaaacaaaggaattatggctggtaacatagtttttagtctaattgaatcccttaaactcagggagcatttataaatggcaaatgcttatgaaactaagatttgtaatatttctctctttttagagaaatttgccaatttactttgttatttttccccaaaaagaatgggatgatcgtgtatttatttttttacttcctcagctgtagacaggtccttttcgatggtacatatttctttgcctttataatcttttatacagtgtcttacagagaaaagacataagcaaagactatgaggaatatttgcaagacatagaatagtgttggaaaatgtgcaatatgtgatgtggcaaatctctattaggaaatattctgtaatcttcagacctagaataatactagtcttataataggtttgtgactttcctaaatcaattctattacgtgcaatacttcaatacttcatttaaaatatttttatgtgcaataaaatgtatttgtttgtattttgtgttcagtacaattataagctgtttttatatatgtgaaataaaagtagaataaac

SEQ ID NO: 165 - DNA, 2530 bp, Homo sapiens
  Modified_base 1 ... 2530: n = a,c,g, or t
  ref <308>: DATABASE ACCESSION NUMBER: AF037364
  ref <309>: DATABASE ENTRY DATE: 2001-06-18
ccaggcgctgcgcggctgctctggcgtccagtcctacccgcaacccgccgcgacgttactgctcctctgctgccttcgtttctggtcctcggccgtcctcgccgcccgcccagaggagtccccgcgcccgccaagaagccgctttccgctggcccgcagccgccgcgacttcggcacagtttctccctctggctagtctcccaaacggccgctcctcgcccgcgggaagaccaggctgcgaccgcgaacgcccgatcctctccaggagccgcagcgagcgcccggcggccacgccccgcgacacaccccggcggctctcggcccagcgcgcctgccttcgccgccgccgtcgctcctcgcccgctgcacgacgacgcgacgcccctgctgcaggcggcggacccgaccggacccagacccagacgcaagatggcgacggccgcgtgactgcctcagcgtccccgagctcggctccgagtgcacctacggactgactgtgggggcagagaagggcgagatcaggactctgtctttgttaatcgtgactgcatgaaggtcgcctccctcgggcctacttggtgggagtgtctggtattgttctaaggccaggagcacggtgagccacagtctgttggtagaatttggcgtcttgatagttgagaaaatggcgatgacactgttggaagactggtgccgggggatggatgtgaactcccagaganctctgttagtctggggcatcccagtgaactgtgatgaggctgaaatcgaagagaccctccaggctgcgatgccccaggtctcctaccgaatgcttgggagaatgttctggagggaagaaaatgcgaaagcagccttattagagctcactggcgctgtagattacgccgcgatccccagggagatgccgggcaaaggaggggtctggaaagtgttatttaagcccccaacttctgatgctgaatttttagaaagattgcacctcttcctagctagagaggggtggaccgtgcaagatgttgcccgtgtccttgggtttcagaaccctactccgaccccgggcccagagatgccagcagagatgctaaactatattttggataatgttattcagcctcttgttgagtccatatggtacaagaggctgacacttttctcggggagggacatcccagggcctggagaggaaacctttgatccctggctggagcacactaatgaggtcctagaggagtggcaggtgtccgatgtagaaaagaggcggcggttgatggagagtcttagaggccccgccgctgatgttattcgcatccttaagtccaacaaccccgcgataaccactgccgaatgcctgaaggcgcttgagcaggtgtttgggagcgttgagagctctagggatgcccagatcaaatttctgaacacttatcagaacccgggagaaaaattgtctgcttatgtcattcgtctggagcctctgctacagaaggtggtagagaagggggccattgataaagataatgtgaaccaggcccgcctagagcaggtcattgccggggccaaccacagcggggccatccgaaggcagctgtggcttaccggggctggggaagggccagccccaaacctctttcagttgctggtgcagatccgtgaggaggaagccaaggaggaggaggaggaggctgaggccacccttctgcagttaggcctggaagggcacttctgagtgccaggaaaggcagctttagtgcagacctagatcacagctacttttcttgtccctgtggggtcttacagatgtgtctctgagtagtaaaggcttagccttgttctgttttgttgttttttggaggggaaggttagtcaggcctgagtattcatgtaacattctaaaattgtgccagcgagcaccgtgaacgactgcaatgcaagcgggtcttgctggctaaaatgcccaggtaaagggttggttggacacagcgcttagtgcacgctgtcatcatggacatcataatcagttgtgaaaaacacgcgaacctatgacacttcttattccacactgaatgtgaaattgcatgttcagatgtttnactacgaggcctggctcacaggaagtgttcagtaaaagtatgcactgttagattactgataacgcggatagatttttgtttaccataaattgttccagatttatattaatggaaggaagtgtgcatttattagctattactcaactttacaatgcaaacatcttatttctcatctttaaacatgtcgaccagtttaattgaaaagtattctgagactgcaaaatggggtgttaaaaaatactgcagttacggagctgtgtaaaccagtttctcattgcataagatacagatgtaaattgcatggagaggttgatatgcacctgtacagtaattcactcccccatttcacttctttgtcagagaatagttcttgttcatactgagtgttctaaatttgaagttatatatacaaattaaaatattttaaaaaaaaaaaaaag

SEQ ID NO: 166 - DNA, 1372 bp, Homo sapiens
  ref <308>: DATABASE ACCESSION NUMBER: U00947
  ref <309>: DATABASE ENTRY DATE: 2001-06-18
ctgccgtcatgtctaagtcagagtctcctaaagagcccgaacagctgaggaagctcttcattggagggttgagctttgaaacaactgatgagagcctgaggagccattttgagcaatggggaacgctcacggactgtgtggtaatgagagatccaaacaccaagcgctctaggggctttgggtttgtcacatatgccactgtggaggaggtggatgcagctatgaatgcaaggccacacaaggtggatggaagagttgtggaaccaaagagagctgtctccagagaagattctcaaagaccaggtgcccacttaactgtgaaaaagatatttgttggtggcattaaagaagacactgaagaacatcacctaagagattattttgaacagtatggaaaaattgaagtgattgaaatcatgactgaccgaggcagtggcaagaaaaggggctttgcctttgtaacctttgacgaccatgactccgtggataagattgtcattcagaaataccatactgtgaatggccacaactgtgaagttagaaaagccctgtcaaagcaagagatggctagtgcttcatccagccaaagaggtcgaagtggttctggaaactttggtggtggtcgtggaggtggtttcggtgggaatgacaacttcggtcgtggaggaaacttcagtggtcgtggtggctttggtggcagccgtggtggtggtggatatggtggcagtggggatggctataatggatttggcaatgatggaagcaattttggaggtggtggaagctacaatgattttgggaattacaacaatcagtcttcaaattttggacccatgaagggaggaaattttggaggcagaagctctggcccctatggcggtggaggccaatactttgcaaaaccacgaaaccaaggtggctatggcggttccagcagcagcagtagctatggcagtggcagaagattttaattaggaaacaaagcttagcaggagaggagagccagagaagtgacagggaagctacaggttacaacagatttgtgaactcagccaagcacagtggtggcagggcctagctgctacaaagaagacatgttttagacaaatactcatgtgtatgggcaaaaaactcgaggactgtatttgtgactaattgtataacaggttattttagtttctgttctgtggaaagtgtaaagcattccaacaaagggttttaatgtagattttttttttgcaccccatgctgttgattgctaaatgtaacagtctgatcgtgacgctgaataaatgtcttttttttaatgtgctgtgtaaagttagtctactcttaagccatcttggtaaatttccccaacagtgtgaagtta

SEQ ID NO: 167 - DNA, 538 bp, Homo sapiens
  ref <308>: DATABASE ACCESSION NUMBER: AA402892
  ref <309>: DATABASE ENTRY DATE: 2001-06-18
tttttttttttcactttgtatttgttccacagcattctagccaggagtacaaaataggagctcttcaagcagcacatgaagatggcccaggagccttcagccatccagagcagcagagcagcacctaaatctccacacacttcccagtataaccactaagaacacactagacccttggcattaggggatttatcatttccagttctattatctgggaatgactccaagggtttgtgacaagcttttgaaacgtaagtgctaagacgagtgtggacaagtcactgagctaatgaagaatagacccactgtctgcttggctctggtattttgtaccctgtcttcacatgtggggaaacttcataactgtgcccacaaatcagagaaattcgcaaaggactagacaatgtattgcctgtgaacttcagaggcaactggaaatagtgcaactggaaatcaactagcttcatacataggcggatttgtttccagggaccaaaagcacagaagataagaaaacttttcaggtgatggccatatt

SEQ ID NO: 168 - DNA, 5191 bp, Homo sapiens
  ref <308>: DATABASE ACCESSION NUMBER: AB011166
  ref <309>: DATABASE ENTRY DATE: 2001-06-18
gagaaagaaaaacagctcgagacctcatgcaaagagaaaactgagtatctacagaaaatggttcagaggaatgaaagatataaacaagatgtggagaggttctatgaacggaagcgacatttagatttaattgagatgcttgaagcaaaaaggccatgggtggaatatgaaaatgttcgtcaggaatatgaagaagtaaaactagttcgtgaccgagtgaaggaagaggtcagaaaacttaaagaagggcagattcctataacatgtcgaattgaagaaatggaaaacgagcgtcacaatttggaggctcgaatcaaagaaaaggcaacagatattaaggaggcatctcaaaaatgcaaacagaagcaagatgttatagaaaggaaagataaacatattgaggaacttcagcaggctttaatagtaaagcaaaatgaagagcttgaccgacagaggagaataggtaatacccgcaaaatgatagaggatttgcaaaatgaactaaagaccacggaaaactgcgagaatcttcagccccagattgatgccattacaaatgatctgagacggattcaggatgaaaaggcattatgtgaaggcgaaataattgataagcgaagagagagggaaactctagagaaggagaaaaagagtgtggacgatcatattgtacgttttgacaatcttatgaatcagaaggaagataagctaagacagagattccgtgacacgtatgatgctgttttatggctaagaaataacagagacaaatttaaacaaagagtctgtgagcccataatgctcacgatcaatatgaaagataataaaaatgccaaatatattgaaaatcatattccatcaaatgacttaagagcctttgtatttgaaagtcaagaagatatggaggttttcctcaaagaggttcgtgacaataaaaaattaagagtaaatgctgttattgctcccaagagttcatatgcagacaaagcaccttcaagatctttgaatgaacttaaacaatacggatttttctcttatttgagagaattatttgatgcacctgatcctgtaatgagttacctttgctgtcagtatcatattcatgaagttcctgtaggaactgaaaagaccagagaaagaattgaacgggtaatacaagaaacccgattaaaacagatttatacagcagaagaaaagtatgtggtgaaaacttctttttattcaaacaaagttatttctagtaacacatctctaaaagtagcgcagtttctcactgtcactgtggacctagagcagagaagacacttagaagaacagctaaaggaaattcatagaaaattgcaagcagtggattcagggttgattgccttacgtgaaacaagcaaacatctggagcacaaagacaatgaacttagacaaaagaagaaggagcttcttgagagaaaaaccaagaaaagacaactggaacaaaaaatcagttccaaactaggaagtttaaagctgatggaacaggatacttgcaatcttgaagaggaagagcgaaaagcaagtaccaaaatcaaagaaataaatgttcaaaaagcgaaacttgttaccgaattaacaaacctaataaagatttgtacttctttgcatatacaaaaagtagatttaattctccaaaatactacagtgatctctgagaagaacaaattagaatcagattatatggccgcatcttcacaactccgtcttacagagcaacatttcattgaattggatgaaaatagacagagattattgcagaaatgcaaggaacttatgaaaagagctaggcaagtatgtaacctgggtgcagagcagactcttcctcaagaataccagacacaagtacccaccattccaaatggacacaactcctcactccccatggttttccaagaccttccaaacacattggatgaaattgatgctttattaactgaagaaagatcaagagcttcctgcttcacgggactgaatcctacaattgttcaggaatatacaaaaagagaagaagaaatagaacagttaactgaggaactaaagggaaagaaagttgaactagatcaatacagggaaaacatttcacaggtaaaagaaaggtggcttaatcctttaaaagagctggtagaaaaaattaatgaaaaattcagcaatttttttagttccatgcagtgtgctggtgaagttgatctccatacagaaaatgaggaagattatgataaatatggaattcgaattagagtcaaatttcgaagtagtactcaactgcatgaattaactcctcatcatcaaagtggaggtgaaagaagtgtttctaccatgttatacttgatggcacttcaggagctaaatagatgtccattcagagtagttgatgaaatcaatcagggaatggacccaatcaatgaacggagagtgtttgaaatggttgtaaatactgcctgtaaagaaaatacatctcaatactttttcataacaccaaagctcctgcaaaatcttccttattctgaaaagatgacagttttgtttgtctacaatggccctcatatgctggaaccaaacacatggaatttaaaggctttccaaaggcggcggcgccgtattacattcactcaaccttcttaataaaagtaaagagagggaacttgggaattttttttgttaaattctgtttataagtatggctcaactgaataaaaggagattcactaaaacgaaaagcagttatttttggaaacctgcttttaaatacaaataggttgataatggaaactataatgacctttccaaaatagcagctggtagtaaaagttaagtcttcttcagtcttggttgaacttgagttcttggcactctgaccatgagtcattcagttctcatgttaaaatgtacttaatattacaaatcaaaggtacagtggaagaagggttaatcacaagaagttacttatatggtagccctgagctttaattgcagagtaactttaattacttttagagcctaaagatgactctagagcctaagtcctagtttctcccaatgttatatttaattttaaaaaattgatatgaaaatgtctaatgtatagtaataatttatgacagatctagtcatttcttcctattaaaaaagattaccttatctccagtaggaaatggaattttatgggcctttaaaagaaagttttatgaaacttgatgctataattttattggtatttcaaggggaaaaaagcactggggttcaaaaatggtagcagaactgctttgaaatgctgcaaggtggccactagatgatgcaaaatacaaccaaaagattgactgagaataaaattaggtgacaagggtttttaaagaataaccttttaaagtgtgggggcaggggttgcttttttttattttatttaaagtcaattatattttacatcttacatttctaaaagcattttataattatttttagtaagatttttcttaaaatttcatatactggtttctacaatttatatttgaaatttctcagtgttatgtaaagagtgatggaaaagcattgatttctttaaaaccgtaatgtttttagaacttaagcctatagggcctttcttacaatgttgatgtacccattatcttagaaaatctagtttaaactgttttctttcaccgcaaaagaattaaatgggaaaatcatttgtttatctctaagttatactaattagtagaaccaaacaaattatcttcttttaaaaaataaatcttataggaaaatagacagtccaaagtcatgtctttgaacagtggattggatctgtgccagtaatgacaaaattatttttttgacttgcttgcctgaataaattgaagaattgctttcagtttgggttttgtatattcttaagtagccattgaaatttatattcttaactaggtcaaaaaataatgagccataagtttatgtcctctcacttagacattttctctttaaaaaggtattttcttctttataaacattttaaaagagccttcccttcttaaactaactccagtgcatgaagtgtgaaaatattttaaaatgacatttttactaatatgagcaagtcatgtaaacattgaagaacttggtaacatattagtaaatggatattaccaaatgttttcatcgttaattactttgcgttccaccaaaatatctttactaaaatgtgcttggtgtagtttgtttattgtctaaattagtaccagtcatcttatttctgcaaaatgagtatcaatgtgaaaaagacacgtgaagattaagcatgtttgaaaataaaatggtcaattacatttcaatttacataggccaacaactgttccatactttgtttgtaaacatttaatttctctactggacaaaattaatatttggctttacattgaattttgagctgtgaagaataaattatgtatcattttagcatattaaacagtagtaagtctagcacatagtctcagccacttaaaacaaaagtttttttgtttgtttgtttgtttgtttttttgagatggagtctcactctgttgcccaggctggagtgcagtggcgtgatctcggcttactgcaacctccgcctcccgggttcaagcgattctcctgcctcagcctcccaagtaactgggacaacaggcgcgtcccaccacacccagctaattttttatacttttagtagagatggggtttcagcatattggccaggctggtctcgaactcctgaccttgtgatccacccgcctcggcctcccaaagtgctgggattataggcgtgagcccctgcacccggccaaaagttgatttttaattacataaaaatcgtaaaaacttctagtaaaaacttgatttggtgaatacagttatattttaaaaccttaaggtgacaagcattttctatgcctaaatcttcattggtttgcctggaaagagtctctgttaaaagattttccatattcaaagtaaaaggaaagatttcttgcttcctaattgtcttttggacacatgcctattttctttgaggtataaacctttagatgtgaaaaatgtaatttcattctgctattgtgtgtgcttgtgtgtgtgtaattgaaaaaactgggaaatcctgctttgttggtaataaatcaatatttttatattc

SEQ ID NO: 169 - DNA, 554 bp, Homo sapiens
  Modified_base 1 ... 554: n = a,c,g, or t
  ref <308>: DATABASE ACCESSION NUMBER: AI701109
  ref <309>: DATABASE ENTRY DATE: 2001-06-18
cccacatcttatgcatggtggtgtatgtgctgtatatgtagtaaaatggaattcgcacctgtgaacttgctctttcatgtgaaaagataagcgaggtcattgtcagagattggttggtttgccttgcaaaacagaaaaatggaattttagctcaaaaagtagaatctaaaatcaacacagatgtacaactagattctcaagagaaaattggagttaaaggtgagctgtttcaagaggatgaccatgaagaatcgcattctgattttccatatggatcatttccctatgttgctagaccagtacactggcaacctggtcatacagctttttttgtcaagttgaggaaggtcaaaccacaacttaactgagtactccagatgacagtaactgacttgaagatggaaaaatatcaaaatagaactttatattgaaaatcactgcttccatagattggcatttttagctattactatgacttatataacttatacatataattntgaaaataacaactaaaagatgtataacatagcaaaactgcttanacatcccat

SEQ ID NO: 170 - DNA, 2744 bp, Homo sapiens
  ref <308>: DATABASE ACCESSION NUMBER: U41060
  ref <309>: DATABASE ENTRY DATE: 2001-06-18
ctcgtgccgaattcggcacgagaccgcgtgttcgcgcctggtagagatttctcgaagacaccagtgggcccgtgtggaaccaaacctgcgcgcgtggccgggccgtgggacaacgaggccgcggagacgaaggcgcaatggcgaggaagttatctgtaatcttgatcctgacctttgccctctctgtcacaaatccccttcatgaactaaaagcagctgctttcccccagaccactgagaaaattagtccgaattgggaatctggcattaatgttgacttggcaatttccacacggcaatatcatctacaacagcttttctaccgctatggagaaaataattctttgtcagttgaagggttcagaaaattacttcaaaatataggcatagataagattaaaagaatccatatacaccatgaccacgaccatcactcagaccacgagcatcactcagaccatgagcgtcactcagaccatgagcatcactcagaccacgagcatcactctgaccataatcatgctgcttctggtaaaaataagcgaaaagctctttgcccagaccatgactcagatagttcaggtaaagatcctagaaacagccaggggaaaggagctcaccgaccagaacatgccagtggtagaaggaatgtcaaggacagtgttagtgctagtgaagtgacctcaactgtgtacaacactgtctctgaaggaactcactttctagagacaatagagactccaagacctggaaaactcttccccaaagatgtaagcagctccactccacccagtgtcacatcaaagagccgggtgagccggctggctggtaggaaaacaaatgaatctgtgagtgagccccgaaaaggctttatgtattccagaaacacaaatgaaaatcctcaggagtgtttcaatgcatcaaagctactgacatctcatggcatgggcatccaggttccgctgaatgcaacagagttcaactatctctgtccagccatcatcaaccaaattgatgctagatcttgtctgattcatacaagtgaaaagaaggctgaaatccctccaaagacctattcattacaaatagcctgggttggtggttttatagccatttccatcatcagtttcctgtctctgctgggggttatcttagtgcctctcatgaatcgggtgtttttcaaatttctcctgagtttccttgtggcactggccgttgggactttgagtggtgatgcttttttacaccttcttccacattctcatgcaagtcaccaccatagtcatagccatgaagaaccagcaatggaaatgaaaagaggaccacttttcagtcatctgtcttctcaaaacatagaagaaagtgcctattttgattccacgtggaagggtctaacagctctaggaggcctgtatttcatgtttcttgttgaacatgtcctcacattgatcaaacaatttaaagataagaagaaaaagaatcagaagaaacctgaaaatgatgatgatgtggagattaagaagcagttgtccaagtatgaatctcaactttcaacaaatgaggagaaagtagatacagatgatcgaactgaaggctatttacgagcagactcacaagagccctcccactttgattctcagcagcctgcagtcttggaagaagaagaggtcatgatagctcatgctcatccacaggaagtctacaatgaatatgtacccagagggtgcaagaataaatgccattcacatttccacgatacactcggccagtcagacgatctcattcaccaccatcatgactaccatcatattctccatcatcaccaccaccaaaaccaccatcctcacagtcacagccagcgctactctcgggaggagctgaaagatgccggcgtcgccactttggcctggatggtgataatgggtgatggcctgcacaatttcagcgatggcctagcaattggtgctgcttttactgaaggcttatcaagtggtttaagtacttctgttgctgtgttctgtcatgagttgcctcatgaattaggtgactttgctgttctactaaaggctggcatgaccgttaagcaggctgtcctttataatgcattgtcagccatgctggcgtatcttggaatggcaacaggaattttcattggtcattatgctgaaaatgtttctatgtggatatttgcacttactgctggcttattcatgtatgttgctctggttgatatggtacctgaaatgctgcacaatgatgctagtgaccatggatgtagccgctgggggtatttctttttacagaatgctgggatgcttttgggttttggaattatgttacttatttccatatttgaacataaaatcgtgtttcgtataaatttctagttaaggtttaaatgctagagtagcttaaaaagttgtcatagtttcagtaggtcatagggagatgagtttgtatgctgtactatgcagcgtttaaagttagtgggttttgtgatttttgtattgaatattgctgtctgttacaaagtcagttaaaggtacgttttaatatttaagttattctatcttggagataaaatctgtatgtgcaattcaccggtattaccagtttattatgtaaacaagagatttggcatgacatgttctgtatgtttcagggaaaaatgtctttaatgctttttcaagaactaacacagttattcctatactggattttaggtctctgaagaactgctggtg

SEQ ID NO: 171 - DNA, 1902 bp, Homo sapiens
  ref <308>: DATABASE ACCESSION NUMBER: AF026293
  ref <309>: DATABASE ENTRY DATE: 2001-06-18
gggattcacttgtgtgcggaactcctcggaaccatggcgtccctttcccttgcacctgttaacatctttaaggcaggagctgatgaagagagagcagagacagctcgtctgacttcttttattggtgccatcgccattggagacttggtaaagagcaccttgggacccaaaggcatggacaaaattcttctaagcagtggacgagatgcctctcttatggtaaccaatgatggtgccactattctaaaaaacattggtgttgacaatccagcagctaaagttttagttgatatgtcaagggttcaagatgatgaagttggtgatggcactacctctgttaccgttttagcagcagaattattaagggaagcagaatctttaattgcaaaaaagattcatccacagaccatcatagcgggttggagagaagccacgaaggctgcaagagaggcgctgttgagttctgcagttgatcatggttccgatgaagttaaattccgtcaagatttaatgaatattgcgggcacaacattatcctcaaaacttcttactcatcacaaagaccactttacaaagttagctgtagaagcagttctcagactgaaaggctctggcaacctggaggcaattcatattatcaagaagctaggaggaagtttggcagattcctatttagatgaaggcttcctgttggataaaaaaattggagtaaatcaaccaaaacgaattgaaaatgctaaaattcttattgcaaatactggtatggatacagacaaaataaagatatttggttcccgggtaagagttgactctacagcaaaggttgcagaaatagaacatgcggaaaaggaaaaaatgaaggagaaagttgaacgtattcttaagcatggaataaattgctttattaacaggcaattaatttataattatcctgaacagctctttggtgctgctggtgtcatggctattgagcatgcagattttgcaggtgtggaacgcctagctcttgtcacaggtggtgaaattgcctctacctttgatcacccagaactggtgaagcttggaagttgcaaacttatcgaggaagtcatgattggagaagacaaactcattcacttttctggggttgcccttggtgaggcttgtaccattgttttgcgtggtgccactcaacaaattttagatgaagcagaaagatcattgcatgatgctctttgtgttcttgcgcaaactgtaaaggactctagaacagtttatggaggaggctgttctgagatgttgatggctcatgctgtgacacagcttgccaatagaacaccaggcaaagaagctgttgcaatggagtcttatgctaaagcactgagaatgttgccaaccatcatagctgacaatgcaggctatgacagtgcagacctggtggcacagctcagggctgctcacagtgaaggcaataccactgctggattggatatgagggaaggcaccattggagatatggctatcctgggtataacagaaagttttcaagtgaagcgacaggttcttctgagtgcagctgaagcagcagaggtgattctgcgtgtggacaacatcatcaaagcggcacccaggaaacgtgtccctgatcaccacccctgttaagcattcccacgtgctgtcgatctttggaccagtttctagcaaagttgtgtttgaaagatactctattaaagaagactgtggaatctgtttatcggtgcccattatatccttaagtttggatatttagctgaccttcgctttaacataggtctaatttatttgccgtgtcattttccatacaaatcagttgatttaaaaaagttcatttctcatactgtgcattaaaataaaaatttgaacaattaaaaaaaaaaaaaaaaa

SEQ ID NO: 172 - DNA, 1604 bp, Homo sapiens
  ref <308>: DATABASE ACCESSION NUMBER: AF041037
  ref <309>: DATABASE ENTRY DATE: 2001-06-18
tgtgaacagtgtgggaagtgcaagtgtggagaatgcactgctcccaggaccctaccatcctgtttggcctgtaaccggcagtgcctttgctctgctgagagcatggtggaatatggaacctgcatgtgcttagtcaagggcatcttctaccactgctccaatgacgacgaaggggattcctattcagataatccttgctcctgttcacaatcacactgctgctctagatacctgtgtatgggagccatgtctttatttttaccttgcttactctgttatcctcctgctaaaggatgcctgaagctgtgcaggaggtgttatgactggatccatcgcccagggtgcagatgtaagaactccaacactgtctattgtaagctggagagctgcccctcccggggtcagggtaaaccatcatgatttttggaggtgggttgtacctcctgaacttttagctttcaagttgtggctgttttttgttttgttttgtttgttttctttaaattttccgttccctccttcccctgttgccaaggtctaactcatggatttttctctttcctcatggatgatcttcagcaagagtggactgggaagctgcacctggctcccactttcaacaagagcctctgccatccacttgagggtattgagagccagtgggcttttgtgtacctttttgttctgcaagcaactttctaaagttgtgtacatgaacatacacccacatccagaacagtgatttagagttgttttgattgggtaccgtgggagcagggaaattggttttttaaaaagcaactgtttaattgcttaaataagctatgtattaaatctgtctccagttagggctatcttcctagcataggccccttaagtagcatgggggaattttgtataacgtaaaaatttcctttaaccactgccctctccttcttttccttcaaggtttttccccctcagtttgttgttgtcttattggagatgccaagtgattttttcttttatgtaattttagattgcctacaatgtaaatttcacattggagataatattggttggacctcgcccatcttcacttagccttcgtatttgtgaaggattcagccaccttccttcttcaccccatgcttctcaccaaaattttgttgtcattgagggcacttggataactcaagttgatatttatagctgatcaatctatatgtgtcacagaactatgctgcctaaagtgatcttggctccttaatggtccttttggccccttggatagttaacagctgagtaattctaatctcttctgtgttttccttgccttaaccacaaattgtggtgctttttgtatattttatgtataaatcacaaagttgaattctgactatttttaagacaaaagtctgttaaacttttttattgtaaagaatatttattatgcgaatctctattattttatggtatttattgcaaaagactgttgaaatgtactcatgtttgaatataacaaaatatcaatacttaacggaaaataaggtgacacgaagaaagtacatatgttaactataatgcagaaaatatattaattaatgaaaaaaaaaaaaaaaaaa

SEQ ID NO: 173 - DNA, 5035 bp, Homo sapiens
  ref <308>: DATABASE ACCESSION NUMBER: U76421
  ref <309>: DATABASE ENTRY DATE: 2001-06-18
gcggcggcggcggcggcggcggcagcggcggccaagcggccaggttggcggccggggctccgggccgcgcgaggccacggccacgccgcgccgctgcgcacaaccaacgaggcagagcgccgcccggcgcgagactgcggccgaagcgtggggcgcgcgtgcggaggaccaggcgcggcgcggctgcggctgagagtggagcctttcaggctggcatggagagcttaaggggcaactgaaggagacacactggccaagcgcggagttctgcttacttcagtcctgctgagatactctctcagtccgctcgcaccgaaggaagctgccttgggatcagagcagacataaagctagaaaaatttcaagacagaaacagtctccgccagtcaagaaaccctcaaaagtattttgccatggatatagaagatgaagaaaacatgagttccagcagcactgatgtgaaggaaaaccgcaatctggacaacgtgtcccccaaggatggcagcacacctgggcctggcgagggctctcagctctccaatgggggtggtggtggccccggcagaaagcggcccctggaggagggcagcaatggccactccaagtaccgcctgaagaaaaggaggaaaacaccagggcccgtcctccccaagaacgccctgatgcagctgaatgagatcaagcctggtttgcagtacacactcctgtcccagactgggcccgtgcacgcgcctttgtttgtcatgtctgtggaggtgaatggccaggtttttgagggctctggtcccacaaagaaaaaggcaaaactccatgctgctgagaaggccttgaggtctttcgttcagtttcctaatgcctctgaggcccacctggccatggggaggaccctgtctgtcaacacggacttcacatctgaccaggccgacttccctgacacgctcttcaatggttttgaaactcctgacaaggcggagcctcccttttacgtgggctccaatggggatgactccttcagttccagcggggacctcagcttgtctgcttccccggtgcctgccagcctagcccagcctcctctccctgtcttaccaccattcccacccccgagtgggaagaatcccgtgatgatcttgaacgaactgcgcccaggactcaagtatgacttcctctccgagagcggggagagccatgccaagagcttcgtcatgtctgtggtcgtggatggtcagttctttgaaggctcggggagaaacaagaagcttgccaaggcccgggctgcgcagtctgccctggccgccatttttaacttgcacttggatcagacgccatctcgccagcctattcccagtgagggtcttcagctgcatttaccgcaggttttagctgacgctgtctcacgcctggtcctgggtaagtttggtgacctgaccgacaacttctcctcccctcacgctcgcagaaaagtgctggctggagtcgtcatgacaacaggcacagatgttaaagatgccaaggtgataagtgtttctacaggaacaaaatgtattaatggtgaatacatgagtgatcgtggccttgcattaaatgactgccatgcagaaataatatctcggagatccttgctcagatttctttatacacaacttgagctttacttaaataacaaagatgatcaaaaaagatccatctttcagaaatcagagcgaggggggtttaggctgaaggagaatgtccagtttcatctgtacatcagcacctctccctgtggagatgccagaatcttctcaccacatgagccaatcctggaagggtctcgctcttacacccaggctggagtgcagtggtgcaatcatggctcactgcagcctcgacctcctgggctcttaagcgatccttccacctcaaccttccaaggagctgggactacagaaccagcagatagacacccaaatcgtaaagcaagaggacagctacggaccaaaatagagtctggtgaggggacgattccagtgcgctccaatgcgagcatccaaacgtgggacggggtgctgcaaggggagcggctgctcaccatgtcctgcagtgacaagattgcacgctggaacgtggtgggcatccagggatccctgctcagcattttcgtggagcccatttacttctcgagcatcatcctgggcagcctttaccacggggaccacctttccagggccatgtaccagcggatctccaacatagaggacctgccacctctctacaccctcaacaagcctttgctcagtggcatcagcaatgcagaagcacggcagccagggaaggcccccaacttcagtgtcaactggacggtaggcgactccgctattgaggtcatcaacgccacgactgggaaggatgagctgggccgcgcgtcccgcctgtgtaagcacgcgttgtactgtcgctggatgcgtgtgcacggcaaggttccctcccacttactacgctccaagattaccaagcccaacgtgtaccatgagtccaagctggcggcaaaggagtaccaggccgccaaggcgcgtctgttcacagccttcatcaaggcggggctgggggcctgggtggagaagcccaccgagcaggaccagttctcactcacgccctgacccgggcagacatgatggggggtgcagggggctgtgggcatccagcgtcatcctccagaacctcacatctgaactgggggcaggtgcataccttggggagggagtagggggacacgggggaccaccaggtgtccacggttgtccccagcatctcacatcagacctggggcaggtgcgcagtgtggggaggggatggggtgcgtcagggcccagcatcgccgcctggcatctctctgccgcagcatttccccttctgaaccgtccagtgactgctttcaatctcggtttacgtttagaaattgagttctactgagtagggcttccttaagtttaggaaaatagaaattactttgtgtgaaattcttgaataaataatttattcagagctaggaatgtggtttataaaataggaagtaattgtgtcaggtcacttttatgccacattattttaattgcaaaaaagcatctatatatggaggagggtgggaaaatagaggtaggaaatagtagcctaaaggaaatcgccacacgtctgtctaaacttaggtctcttttctccgtaggtacctccctgggtagttccacacactaggttgtaacagtctctccctgaggagcagactcccagcatggtgtagcgtggccctgtcatgcacatggggtcccgcagcagtgactgtgtgtcctgcagaggcgtgacccaggcccctgtagccctcagcctcctctagaagcttctgtactccttgtaggatcagatcatggaaaacttttctcagtttacttctaagtaatcacagataatacatggccagtaatcccaggctggccattcattcaggttttttaaaggatatttaacttttatggactagaaggaatcacgagggctactgcacaatacatggcctaagttccctctgttccttcctctgaatcgaatggatgtgggtgaccgcccgaaggccttcacaggatggaagtagaatgatttcagtagatactcattcttggaaaatgccatagttttaaattattgtttccagctttatcaaagacatgtttgaaaaataaaaagcatccaagtgagagctggtgagaccacgtgctgctggcgtagtgtaggccagacattgacagtcctgacgggagctcagggctgcccagcgcccagcgtgcacgggacggccccacgacagagggagtcagcccgggaggtcaggagcgcggcgggcgagggccctgtgtggaccacctccaccaagctcagagatttgcaaccaggtgccttgttgcctccgctcaggatgaaagaggagctgagagaagtgctctgcctgccagtgcagtgcccagctccaaggctctagagggtgttcaggtacactgaggaggggacggctccgtcttcacattgtgcacagatctgaggatgggattagcgaagctgtggagactgcacatccggacctgcccatgtctcaaaacaaacacatgtacagtggctctttttccttctcaaacactttaccccagaagcaggtggtctgccccaggcataaagaaggaaaattggccatctttcccacctctaaattctgtaaaattatagacttgctcaaaagattcctttttatcatccccacgctgtgtaagtggaaagggcattgtgttccgtgtgtgtccagtttacagcgtctctgccccctagcgtgttttgtgacaatctcccctgggtgaggagtgggtgcacccagccccgaggccagtggttgctcggggccttccgtgtgagttctagtgttcacttgatgccggggaatagaattagagaaaactctgacctgccgggttccagggactggtggaggtggatggcaggtccgactcgaccatgacttagttgtaagggtgtgtcggctttttcagtctcatgtgaaaatcctcctgtctctggcagcactgtctgcactttcttgtttactgtttgaagggacgagtaccaagccacaaggaacacttcttttggccacagcataagctgatggtatgtaaggaaccgatgggccattaaacatgaactgaacggttaaaagcacagtctatggaacgctaatggagtcagcccctaaagctgtttgctttttcaggctttggattacatgcttttaatttgattttagaatctggacactttctatgaatgtaattcggctgagaaacatgttgctgagatgcaatcctcagtgttctctgtatgtaaatctgtgtatacaccacacgttacaactgcatgagcttcctctcgcacaagaccagctggaactgagcatgagacgctgtcaaatacagacaaaggatttgagatgttctcaataaaaagaaaatgtttcact

SEQ ID NO: 174 - DNA, 2038 bp, Homo sapiens
  ref <308>: DATABASE ACCESSION NUMBER: Z11793
  ref <309>: DATABASE ENTRY DATE: 2001-06-18
gcaggcccgttggaagtggttgtgacaaccccagcaatgtggagaagcctggggcttgccctggctctctgtctcctcccatcgggaggaacagagagccaggaccaaagctccttatgtaagcaacccccagcctggagcataagagatcaagatccaatgctaaactccaatggttcagtgactgtggttgctcttcttcaagccagctgatacctgtgcatcatcgaggcatctaaattagaagacctgcgagtaaaactgaagaaagaaggatattctaatatttcttatattgttgttaatcatcaaggaatctcttctcgattaaaatacacacatcttaagaataaggtttcagagcatattcctgtttatcaacaagaagaaaaccaaacagatgtctggactcttttaaatggaagcaaagatgacttcctcatatatgatagatgtggccgtcttgtatatcatcttggtttgcctttttccttcctaactttcccatatgtagaagaagccattaagattgcttactgtgaaaagaaatgtggaaactgctctctcacgactctcaaagatgaagacttttgtaaacgtgtatctttggctactgtggataaaacagttgaaactccatcgcctcattaccatcatgagcatcatcacaatcatggacatcagcaccttggcagcagtgagctttcagagaatcagcaaccaggagcaccaaatgctcctactcatcctgctcctccaggccttcatcaccaccataagcacaagggtcagcataggcagggtcacccagagaaccgagatatgccagcaagtgaagatttacaagatttacaaaagaagctctgtcgaaagagatgtataaatcaattactctgtaaattgcccacagattcagagttggctcctaggagctgatgctgccattgtcgacatctgatatttgaaaaaacagggtctgcaatcacctgacagtgtaaagaaaacctcccatctttatgtagctgacagggacttcgggcagaggagaacataactgaatcttgtcagtgacgtttgcctccagctgcctgacaaataagtcagcagcttatacccacagaagccagtgccagttgacgctgaaagaatcaggcaaaaaagtgagaatgaccttcaaactaaatatttaaaataggacatactccccaatttagtctagacacaatttcatttccagcatttttataaactaccaaattagtgaaccaaaaatagaaattagatttgtgcaaacatggagaaatctactgaattggcttccagattttaaattttatgtcatagaaatattgactcaaaccatattttttatgatggagcaactgaaaggtgattgcagcttttggttaatatgtctttttttttctttttccagtgttctatttgctttaatgagaatagaaacgtaaactatgacctaggggttttctgttggataattagcagtttagaatggaggaagaacaacaaagacatgctttccattttttcctttacttatctctcaaaacaatattactttgtcttttcaatcttctacttttaactaataaaataagtggattttgtattttaagatccagaaatacttaacacgtgaatattttgctaaaaaagcatatataactattttaaatatccatttatcttttgtatatctaagactcatcctgatttttactatcacacatgaataaaggcctttgtatctttctttctctaatgttgtatcatactcttctaaaacttgagtggctgtcttaaaagatataaggggaaagataatattgtctgtctctatattgcttagtaagtatttccatagtcaatgatggtttaataggtaaaccaaaccctataaacctgacctcctttatggttaatactattaagcaagaatgcagtacagaattggatacagtacggatttgtccaaataaattcaataaaaaccttaaaaaaaaaaaaaaaaaaaaaa

SEQ ID NO: 175 - DNA, 2219 bp, Homo sapiens
  ref <308>: DATABASE ACCESSION NUMBER: X77794
  ref <309>: DATABASE ENTRY DATE: 2001-06-18
acaactgactctcagaaactgctacaccagctgaatgccctgttggaacaggagtctagatgtcagccaaaggtctgtggtttgagactaattgagtctgcacacgataatggcctcagaatgactgcaagactaagggactttgaagtaaaagatcttcttagtctaactcagttctttggctttgacacagagacattttctctagctgtgaatttactggacagattcctgtctaaaatgaaggtacagcccaagcaccttgggtgtgttggactgagctgcttttatttggctgtaaaatcaatagaagaggaaaggaatgtcccattggcaactgacttgatccgaataagtcaatataggtttacggtttcagacttgatgagaatggaaaagattgtattggagaaggtgtgttggaaagtcaaagctactactgcctttcaatttctgcaactgtattattcactccttcaagagaacttgccacttgaaaggagaaatagcattaattttgaaagactagaagctcaactgaaggcatgtcattgcaggatcatattttctaaagcaaagccttctgtgttggcattgtctatcattgcattagagatccaagcacagaagtgtgtagagttaacagaaggaatagaatgtcttcagaaacattccaagataaatggcagagatctgaccttctggcaagagcttgtatccaaatgtttaactgaatattcatcaaataagtgttccaaaccaaatgttcagaagttgaaatggattgtttctgggcgtactgcacggcaattgaagcatagctactacagaataactcaccttccaacaattcctgaaatggtcccttaactggattattacagcaccaaaaaacttctctgaagcctttctccacaaccttgttctatggattccataatgttacaatggatttaagctatgaagcctcaaaacatcacgagataagcatgatggtctcagacttgggaaaactgcctaatattatgctgtagtggaattatgtttagatttgaattcatctgtgaagcattcaaagcaaagctaaaagcctaaatgtgaaatgctaatgacaagcctgagaaggtaaactgtgaatcttcatttctatcattgatctaactttagatattggatcaatatatttaggtggtattgaaaatgctattggaggagtcacactaatactatcaactatcagtcttcccacagcttcaatcactgtcattattctaatcctactcctacttaaattttaagttatgaggtttatgtcaaaagcaacatttcacaaatgtacttttaaggcataataagggttaacattctaggcagtataaacacaccccataatgcaagtaataggtaatctagagatgtggactttattgctatatgggaattacatttaaatttgagggcatttatataagaaatacagacctataagttggcatattcattaagttatctttaatatttttctagaaacaggtgacatttgatctatcgataaaattttatacagaacctactgcctcaaactgaatcccatcaagaaaactagtttctattgtattagtaactcaaaataaattatcacttcgaaaacttgctttcccacactaaggtaagttcagactagattgaacactccagaattttttactacagactgtttttaagttagaagtgatggcaattttataaatagagaatatacttccactgatgcccttactgtgccaaaacaaaaatcttaagaaaagcaagtagacaccttcataactatgaatgaagctgctgaagtagtgtttaggatcctccatggcagttagtgaatgtaagaagtacagtgttaaagtgttgtaaacagttactcagtgcaatgtatagcctgagtctatccatgatggctatatccaatttgacatcacgttatggatcagtacacaatgaaaaaccaaagaaccacgtatatcttattcttaacttttgtaaaccatgttttatgggtaactttttagttttcccaaaaggctgataaatttcaatattttgaatacatcattgttaattttgagttggcagaggtaaactaaccaactaccattatgttttagtactaagggatatacctttcaataaagttaatgaaattcaaaaaaaaaaaaaaaaaa

SEQ ID NO: 176 - DNA, 1199 bp, Homo sapiens
  ref <308>: DATABASE ACCESSION NUMBER: J00194
  ref <309>: DATABASE ENTRY DATE: 2001-06-18
actcccaacgagcgcccaagaagaaaatggccataagtggagtccctgtgctaggatttttcatcatagctgtgctgatgagcgctcaggaatcatgggctatcaaagaagaacatgtgatcatccaggccgagttctatctgaatcctgaccaatcaggcgagtttatgtttgactttgatggtgatgagattttccatgtggatatggcaaagaaggagacggtctggcggcttgaagaatttggacgatttgccagctttgaggctcaaggtgcattggccaacatagctgtggacaaagccaacctggaaatcatgacaaagcgctccaactatactccgatcaccaatgtacctccagaggtaactgtgctcacgaacagccctgtggaactgagagagcccaacgtcctcatctgtttcatcgacaagttcaccccaccagtggtcaatgtcacgtggcttcgaaatggaaaacctgtcaccacaggagtgtcagagacagtcttcctgcccagggaagaccaccttttccgcaagttccactatctccccttcctgccctcaactgaggacgtttacgactgcagggtggagcactggggcttggatgagcctcttctcaagcactgggagtttgatgctccaagccctctcccagagactacagagaacgtggtgtgtgccctgggcctgactgtgggtctggtgggcatcattattgggaccatcttcatcatcaagggagtgcgcaaaagcaatgcagcagaacgcagggggcctctgtaaggcacatggaggtgatgatgtttcttagagagaagatcactgaagaaacttctgctttaatgactttacaaagctggcaatattacaatccttgacctcagtgaaagcagtcatcttcagcgttttccagccctatagccaccccaagtgtggttatgcctcctcgattgctccgtactctaacatctagctggctttccctgtctattgccttttcctgtatctattttcctctatttcctatcattttattatcaccatgcaatgcctctggaataaaacatacaggagtctgtctctgctatggaatgccccatggggctctcttgtgtacttattgtttaaggtttcctcaaactgtgatttttctgaacacaataaactattttgatgatcttgggtggaaaa

SEQ ID NO: 177 - DNA, 1326 bp, Homo sapiens
  ref <308>: DATABASE ACCESSION NUMBER: J04615
  ref <309>: DATABASE ENTRY DATE: 2001-06-18
gagagtggagcggccgccggagatgcctgacgcatctgtctgaggagcggtcagtgacgcgatggagcgggcaagggatcgcttacacctgagacgaactacagaacagcacgtaccagaggtggaagtccaagtcaaacgcagaaggactgcctcactgagcaaccaagagtgtcagttgtacccgaggcgttctcagcagcagcaagtacctgtggtggatttccaggctgaactgaggcaggcattcttagctgagacaccaagaggtggttaaagccatattggagtagcgaggaatctgattccaagcaaaaaccaggctccatctactctttgaagcttctgcccagcttgcattgtttctaggagaacccgcgtcatacctttatctatagccttcccctaggtcttcagaagcatcaagttttaactgtggacattggatttggtggaacagcaatcatgactgttggcaagagtagcaagatgctgcagcacattgactatagaatgagatgtatcctgcaagatggccgaatcttcattggcacctttaaggcttttgacaagcatatgaatttgatcctctgtgattgtgatgagttcagaaagatcaagccaaagaatgcgaagcaaccagagcgtgaagaaaagcgggttttgggtctggtgttgctgcgtggggagaacttggtatccatgactgtggaggggccaccccccaaagatactggcattgctcgggtaccacttgctggagctgctggaggccctggggttggtagggcagctggtagaggagtaccagctggtgtgccaattccccaggcccctgctggattggcaggccctgtccgaggagttgggggaccatcccagcaggtaatgactccacagggaagaggcactgtagcagctgctgctgttgctgcgactgccagtattgctggagccccaacacagtacccaccaggacggggcactccgcccccacccgtcggcagagcaaccccacctccaggcattatggctcctccacctggtatgagaccacccatgggcccaccaattgggcttccccctgctcgagggacgccaataggcatgccgcctccgggaatgagaccccctccaccaggcattagaggtccacctcccccaggaatgcgtccaccaagaccttagcatactgttgatccatctcagtcactttttcccctgcaatgcgtcttgtgaaattgtgtagagtgtttgtgagctttttgttccctcattctgcattaataatagctaataataaatgcatagagcaattaaactgtg

SEQ ID NO: 178 - DNA, 5421 bp, Homo sapiens
  ref <308>: DATABASE ACCESSION NUMBER: U97105
  ref <309>: DATABASE ENTRY DATE: 2001-06-18
ccgggatccggttttttttgtttttaaaagtgtaatttcctttttatttgcatctgtttatgactgaaaaaaatgactagttattatgaagacactactgttgaagatggatattttaacatggagtttcaacaaaattacttcttgagacagagctgatgtgttttttaaataacgtgattttaagcatatatttgaacaaaactaaaacatttagtattatgaatatgaaaaaagatcagtaaatcaatgtactcttctaggctgaattaaggtagactatttaaggtttcaaaaaagtttggctggggcagaataagttttacaaaacccatgccatccaaaattaagatgacatgtagcagcaagaagtattccaatgtctcataaccagttctcgcaagcaatgtgtattccttactttaaggaagtgtcaaacaaatagaaaaatctggaagaatttactaagtgtaataaattagaggtaaatcgtaataaaagaatttatgtctcacaaaaatattcacaagtgggagttttcttttaccaacttctcagagtccttctagccccctcttcacttctgaaagatgggatttaccaaaatctggtttacatttaacttttcagggacacatgacctgaaaagaaagatgtcagataatactgacattgcctcatgcactttctttgtatcagtccttcttctgtaagtaatcagaattgggtccaaatggcatagaatcaaacattatgtatcatgccaaataccacttcctgcccaacaaaatttcatctttctccagtaatgaagaggtggacattcttgttggactgtagcatctgtgccgcccgctccacaccaaccacggcagctaacctctgggcatcatatttggagtagagaacagtgcaggtccacgtggcctcttctcctctgttggtggctctcagcatattacagatttcactgtaaaagtgtggatatgtcggcagttcatagaaaatcaggttcctgatgccttttattgctgtagtttatttccacccccttccctcctgttttctctctctccttctctctctctctctctctctcttttttttccgccctagctggggctgtgttggaggagaggaagaaagagagacagaggattgcattcatccgttacgttcttgaaatttcctaatagcaagaccagcgaagcggttgcacccttttcaatcttgcaaaggaaaaaaacaaaacaaaacaaaaaaaacccaagtccccttcccggcagtttttgccttaaagctgccctcttgaaattaattttttcccaggagagagatgtcttatcaggggaagaaaaatattccacgcatcacgagcgatcgtcttctgatcaaaggaggtaaaattgttaatgatgaccagtcgttctatgcagacatatacatggaagatgggttgatcaagcaaataggagaaaatctgattgtgccaggaggagtgaagaccatcgaggcccactcccggatggtgatccccggaggaattgacgtccacactcgtttccagatgcctgatcagggaatgacgtctgctgatgatttcttccaaggaaccaaggcggccctggctgggggaaccactatgatcattgaccacgttgttcctgagcctgggacaagcctgctcgctgcctttgaccagtggagggaatgggccgacagcaagtcctgctgtgactactctctgcatgtggacatcagcgagtggcataagggcatccaggaggagatggaagcgcttgtgaaggatcacggggtaaattccttcctcgtgtacatggctttcaaagatcgcttccagctaacggattgccagatttatgaagtactgagtgtgatccgggatattggcgccatagcccaagtccacgcagaaaatggcgacatcattgcagaggagcagcagaggatcctggatctgggcatcacgggccccgagggacatgtgctgagccgacctgaggaggtcgaggccgaagccgtgaatcgtgccatcaccatcgccaaccagaccaactgcccgctgtatatcaccaaggtgatgagcaaaagctctgctgaggtcatcgcccaggcacggaagaagggaactgtggtgtatggcgagcccatcactgccagcttgggaacggacggctcccattactggagcaagaactgggccaaggctgctgcctttgtcacctccccacccttgagccctgatccaaccactccagactttctcaactccttgctgtcctgtggagacctccaggtcacgggcagtgcccattgcacgtttaacactgcccagaaggctgtaggaaaggacaacttcaccctgattccggagggcaccaatggcactgaggagcggatgtccgtcatctgggacaaggctgtggtcactgggaagatggatgagaaccagtttgtggctgtgaccagcaccaatgcagccaaagtcttcaacctttacccccggaaaggccgcattgctgtgggatccgatgccgacctggtcatctgggaccccgacagcgttaaaaccatctctgccaagacacacaacagctctctcgagtacaacatctttgaaggcatggagtgccgcggctccccactggtggtcatcagccaggggaagattgtcctggaggacggcaccctgcatgtcaccgaaggctctggacgctacattccccggaagcccttccctgattttgtttacaagcgtatcaaggcaaggagcaggctggctgagctgagaggggttcctcgtggcctgtatgacggacctgtgtgtgaagtgtctgtgacgcccaagacagtcactccagcctcctcggccaagacgtctcctgccaagcagcaggccccacctgtccggaacctgcaccagtctggattcagtttgtctggtgctcagattgatgacaacattccccgccgcaccacccagcgtatcgtggcgccccccggtggccgtgccaacatcaccagcctgggctagagctcctgggctgtgcgtccactggggactggggatgggacacctgaggacattctgagacttctttcttccttccttttttttttttgtttttttttttaagagcctgtgatagttactgtggagcagccagttcatggggtcccccttgggcccacaccccgtctctcaccaagagttactgattttgctcatccacttccctacacatctatgggtatcacacccaagactacccaccaagctcatacagggaaccacacccaacacttagacatgcgaacaagcagcccccagcgagggtctccttcgccttcaacctcctagtgtctgttagcattccttttcatggggggagggaagataaagtgaattgcccagagctgcctttttcttttctttttaaaaattttaagaagttttccttgtggggctggggaggggccggggtcagggagagtctttttttttttttttttaaatactaaattggaacatttaattccatattaatacaaggggtttgaactggacatcctaatgatgcaattacgtcatcacccagctgattccgggtggttggcaaactcatcgtgtctgtcctgagaggctccacaatgcccacccgcatcgccattctgtagtcttcagggtcagctgttgataaaggggcaggcttgcgttattggcctagattttgctgcagattaaatcctttgaggattctcttctcttttaccatttttctgcgtgctctcactctctctttctctctctagctttttaattcatgaatattttcgtgtctgtctctctctctctctgtgtttcctccagcccttgtctcggagacggtgttttcctcccttgccccattatcttttcacctcccaggtctacatttcatggtggtcgttgggtccgcctaaaggatttgagcgtttgccattgcaagcatagtgctgtgtcatcctggtccatgtaggactggtgctaaccacctgccatcatgaggatgtgtgctagagtgtgggaccctggccaagtgcaggaatgggccatgccgtctcacccacagtatcacacgtggaaccgcagacagggcccagaagctttagaggtatgaggctgcagaaccggagagattttcctctgtgcagtgctctctggctaaagtcacggtcaaacctaaacaccgagcctcattaacccaagtgaaccaaccaaagtcaccagttcagaagtgctaagctaataggagtctgacccgagggcctgctgcttcctggttaagtatcttttgagattctagaacacatgggagctttttattttcggggaaaaaccgtatttttttcttgtccaattatttctaaagacacactacatagaaagaggccctataaactcaaaaagtcattgggaaacttaaagtctattctactttgccaagaggagaaatgtgttttatgaacgatagatcacatcagaactcctgtggggaggaaaccttataaattaaacacatggcccccttagagaccacaggcgatgtctgtctccatccttccctctccttttctgtcacctttccccctagctggctcctttggacctacccctgtccttgctgacttgtgttgcattgtattccaaacgtgtttacaggttctcttaagcaatgttgtatttgcaggcttttctgaataccaaatctgctttttgtaaagcgtaaaaacatcacaaagtaggtcattccatcaccacccttgtctctctacacattttgcctttggggatctggttggggttttgggttttttgttgttgttgtttatttgttattttaaaggtaaattgcacttttaaaaaaataattggttgacttaatatatttgctttttttctcacctgcacttagaggaaatttgaacaagttggaaaaaaacaatttttgtttcaattctaagaaacacttgcagctctagtattcacttgagtcttcctgtttttcctgtaccgggtcatggtaatttttggttgttttggttgttttcttaaaaaacaagttaaaacctgacgatttctgcagtgacttgatgctctaaaacagtgtaggatttaagaatagatggtttttaatcctggaaattgtgattgtgacccatgagtggaggaactttcagttctaaagctgataaagtgtgtagccagaagagtactttttttttgtaaccactgtcttgatggcaaaataattatggtaaaaaacaagtctcgtgtttattattccttaagaactctgtgttatattaccatggaacgcctaataaagcaaaatgtggttgtttcaaaaaaaaaaaaaa

SEQ ID NO: 179 - DNA, 2950 bp, Homo sapiens
  ref <308>: DATABASE ACCESSION NUMBER: AF061016
  ref <309>: DATABASE ENTRY DATE: 2001-06-18
gcggcccgtaggaaggtgctgtccgatcgatcgggataggagcggtccctgcgcttgctgctgggaagtggtacaatcatgtttgaaattaagaagatctgttgcatcggtgcaggctatgttggaggacccacatgtagtgtcattgctcatatgtgtcctgaaatcagggtaacggttgttgatgtcaatgaatcaagaatcaatgcgtggaattctcctacacttcctatttatgagccaggactaaaagaagtggtagaatcctgtcgaggaaaaaatctttttttttctaccaatattgatgatgccatcaaagaagctgatcttgtatttatttctgtgaatactccaacaaaaacctatggaatggggaaaggccgggcagcagatctgaagtatattgaagcttgtgctagacgcattgtgcaaaactcaaatgggtacaaaattgtgactgagaaaagcacagttccagtgcgggcagcagaaagtatccgtcgcatatttgatgcaaacacaaaacccaacttgaatttacaggtgctgtccaaccctgagtttctggcagagggaacagccatcaaggacctaaagaacccagacagagtactgattggaggggatgaaactccagagggccagagagctgtgcaggccctgtgtgctgtatatgagcactgggttcccagagaaaagatcctcaccactaatacttggtcttcagagctttccaaactggcagcaaatgcttttcttgcccagagaataagcagcattaactccataagtgctctgtgtgaagcaacaggagctgatgtagaagaggtagcaacagcgattggaatggaccagagaattggaaacaagtttctaaaagccagtgttgggtttggtgggagctgtttccaaaaggatgttctgaatttggtttatctctgtgaggctctgaatttgccagaagtagctcgttattggcagcaggtcatagacatgaatgactaccagaggaggaggtttgcttcccggatcatagatagtctgtttaatacagtaactgataagaagatagctattttgggatttgcattcaaaaaggacactggtgatacaagagaatcttctagtatatatattagcaaatatttgatggatgaaggtgcacatctacatatatatgatccaaaagtacctagggaacaaatagttgtggatctttctcatccaggtgtttcagaggatgaccaagtgtcccggctcgtgaccatttccaaggatccatatgaagcatgtgatggtgcccatgctgttgttatttgcactgagtgggacatgtttaaggaattggattatgaacgcattcataaaaaaatgctaaagccagcctttatcttcgatggacggcgtgtcctggatgggctccacaatgaactacaaaccattggcttccagattgaaacaattggcaaaaaggtgtcttcaaagagaattccatatgctccttctggtgaaattccgaagtttagtcttcaagatccacctaacaagaaacctaaagtgtagagattgccatttttatttgtgatttttttttttttttggtacttcaggatagcaaatatctatctgctattaaatggtaaatgaaccaagtgtttttttttgttttttttttgagacagagtctcactgttgcccaggctggagtgcagtggtgcaatctcggctcactgcaagctctgcttcccaggttcacgccattctcctggctcagcctcccaagtagctgggactacaggcacccgccacagtgcctgggctaattttttgtatttttagtagagacagggtttcaccatgtgagccaggatggtctcaatctcctgaccttgtgaaccacccgtctcggcctcccaaagtgctgggattacaggtgtgagccaccacgcctgggcccatgaaccaagtgtttttaaggaaacaaaactatttttttaatcatcagatttatactagctatatggatattagcatatctggtaattatgaatctagaatttttttacatatttttataatactgttagctcagttattggatgagtgaaagataatcatgttggttttaatagtgtcaatttttgtaaaataaaaattaaacttcaaactctttactttataaattgtccataggccacactttaatatcacattataaagggaaggacagtcttcattcctcctggttattggtttgtttgtcattaaagatatattttgaatccatgaaattgctatgctaaacagcctttacatgtatggtctggttaaagttcctttgttccttttgttttaataaaatgtgtcactgattttttagctcaaaatcatcactgttaatttccagtcaccccaaatatggttaaaagatttttttttttaatcatgaagagaaaattagtagcatttctttctctccccattatttattggttttcctcactaatctttttttttttagtccaaaagccaaaaatatttatcttggttttacattttaatttccattcttaattgtaatttttttctttaaataaggaaaccaatataatctcatgtataaaaacttaaatattttacaagttacatatagcatcattctaaaataagaattttttttgttttctgtctgcttttttcttatgtctcttgttgagttttatattttcagtggttatttttgcttgtgttagatcattattaaaatatatccaatgtccctttgatacttgtgctctgctgagaatgtacagtttgcattaaacatcccaggtctcatccttcaggaattttgcagttcaatgagaagagggagacaaatataaagatgaggacagaagcatctctacagatgaaaattacataaataaaacattctccatcaacaaaa

SEQ ID NO: 180 - DNA, 5526 bp, Homo sapiens
  ref <308>: DATABASE ACCESSION NUMBER: AB006624
  ref <309>: DATABASE ENTRY DATE: 2001-06-18
cgggccctggggctcgggagtcgggggcggtgggacagtgcggctactcttgatcctctccggctgcttggtctacggcacagctgaaactgatgtaaatgtggtcatgcttcaggaatcccaagtttgtgaaaagcgtgccagccaacaattctgttacacaaatgtgcttatcccaaaatggcatgatatatggacacggatacagatccgagtaaatagttccagattggttcgagtcacccaggtggagaatgaggagaaactgaaggagctagagcagtttagtatctggaactttttttcctcctttttaaaagagaaattgaatgacacctatgttaacgtgggtctatacagcacaaaaacctgcctcaaagttgagattatagagaaggacaccaagtacagtgtcattgtgatccggagatttgatcccaaactctttcttgttttccttcttggacttatgctatttttttgtggagacttgctgagcagaagtcaaattttctactactctactgggatgactgtgggaattgtggcctctctgctaatcatcatttttatactatctaagtttatgcctaagaaaagtcccatttacgtcatcctggtgggaggctggtctttttctctgtacctcattcaactagtttttaaaaatttacaagagatctggaggtgttactggcagtatcttttaagttatgtcctcacagttggattcatgagttttgcagtatgttacaagtatgggcccttggagaatgaacgaagtatcaacctgctgacctggaccttgcagctgatgggcctgtgtttcatgtattctggcatccagataccacatattgcccttgccattatcatcattgctctttgtactaagaacctggaacaccctattcagtggctgtacatcacctgcagaaaggtgtgtaagggagcagaaaagcctgttccccctcgtctcctgacagaagaagaatatcggatacaaggagaggtagaaacccgaaaggctttagaggagctccgagaattttgtaacagtccagactgctctgcttggaagactgtttctcgaatccagtctccaaaaagatttgctgactttgtggaaggctcttcccacctcacgccaaatgaagtttctgtccatgagcaggagtatggattagggagcattattgcccaggatgaaatctatgaggaagcatcctctgaggaggaggactcatattctcggtgtcctgctatcacacagaacaactttctaacctaggtagtggtcagttatctttacgtggactggcttggtgccttggtccatgttgcatgtgttgtgcaattgctttcaaccctttgaaacagagtgagatagatagggtagaaattctcctactgaaataagaggcctaaaaaggcctccctttggaaatgggaggtctctatgggatccctgaggaaggagagtggataaagtagtgaatgctgggtagttcacttcccattggttaagctaacagcccacttttatgtttccagagaaattggatggccacagctagcatggcattctagctccttcttgaaagttgattcaatcatggcatttctgtcactggctggctctccaaagtaagaactgttgttaagtgcaggaatgcttttagactataggctgcaacttccagagagaaatccacaaatctgagcctccttcactccagcttttatttcagtgactttagaataattattgatttaactgttttgggaggaaaatagatttttattgttttgttttttaaatgaatgtcttttaaaaaacataacaaactcatgttccagaaccagcaagtgctccagagtgacacaccccctaggcccctacatatttattaatatggattatccattaaagccccaggagctgttgttttaagctttgatttagttctcatacatatgatagaaagtcctatttgcctttaggaacatgcctgtaggctcttctgcaggtgagatgtactgggctttttattatattcaactttcaattccatcttaaaaaacatttgtattcttctcttcccattcttccttaccctgcctttgccctttcaggaagggtcagttcccttacctgtgaactatgtatgttcagagtagcattattcctgctagctaggagaagtcatcttgtttaggggatttggatgctttttatacgttctccattttcctgtcattgggtcatgttatctttgagttgctatgaaatcaggaaactgtctccttttcctttcccttcctttgtctacatgctctgtccattcctttcagccttttctcaccacccatactcccccaaatctgggtaatttttaagccttgaaactatgtagtttcttgatacacaatttgtagttatgcagcagccacaatttgcattgccaggaaataggctccaggttatcttcatgcctctgggtgctcattcagctgtcaagtttccatgaacttacacttatttatgattgcgtttctgacctgagatgtatgctgcctgttattgcagtagcattagtttcagattcttttgccattgcaaagtaccccttataaaccagcaatgtcatctgtgaggaagcaaattctcaagtgtctgtcatttacttggttctttttctttgtggtcttcacccttataccctggaaaagtctgtaattaccttagccaggaagatagatggtcatggcaagcgcacagcaccagacttactggctcaccaagatgatggaaaaaggcagatgattttttaaaaagccgtaatgactcctttagaccagccatttagcgtggtaattttgaaaggcctagctccattgcagacttccaaagggtcagctctgagactgccctccaggtgggcagttgattatttccaccagtgttttccagagccttaaactgtcctaagtgacaactacctcagttggcaggaaagagacatatagtagaaagtgaaaaatgagcagtatttgggcagatgctatgggttacagttgaagggtaaaaggaactttacattgggaaacctttatacccttgtgaattatgtacatggtaaaatgttctctctctacaaagaactattaaaacttctgaaatatactattttttaccttatttatagaaattgagacctagcatatttaagcataagtttattttaaaaaataattcaactcgtgcaagtggtctcaggattctctggagattttggtgcctcccctacttagggaggtgatagcttgcctataagggtgacttttcctgatcatgtctttatttcaatgagaaagcactgtgaaattgtgaaagattctcctctttctctgtttaataaacccccatgaaatatagtttccatctctagaccagttttttttccaccgtgtttagacttgaggtgaataaaatcaaactgttttttactccctatctggtagttggagacctgagctgtaggcagtggagatggcaattggttctgcagcctgagagttgctctcacacagtgaaggacggtgctgctctggtgtgctgtgtgtccttgccctgcctgcctgtggctctgcccagatgcttcagatcctctgtgttccggagattgcttgacttcaaccttctttaggagctgctcttgtctccctcttggccacttagtttgctggctcagtcactacttgaagaccccatttaatttttctctggcagttatagctcttgtgatttcagtacagtctcatctctcagaccaatctcatcaagaaggattgaagggataactatgaggtaagctggacattggagccgtgtttgctgccacgtcagcgtcttgctgggtgaatgtcaagccataaatgggctccagggctctggatctcatcagcattggaaatctattgcctctcatcagtctgaccaaattatgtagagcattaatgtagagactcccattaatgggaatacaagaggcagctggcataaaacatttctttcactttcctttcccactcagattgcttcaagagaccaacagaacacagggatcaaaaacaaggaaaatttagcaacttcattaccttctaataagtaattcctgttagccactgcatcccaccaaaactagtttatttttcccctcaaattcatgatttttacgtctgttacaaagggaattttgctgatagctctttgggtcccactgttccattttatgctaatagattccattctagggcccagccgtctcttgactgatggtgttccctttaacccttggcatgtataatagaattttggtgaatgaaagaacccaaataggccagatagtccccccaggccctgatatccataaaaggcttgggaatgcattatgtaattgtccttagtctttttgttgttttagaaaaaaaaaacaagatgggctcagatggatgcctacgtaaaaatggttcctagctgtgtactcataacttttctttgaattgagtagtgaaaggaaggaggaggaaaggaaattaaatgtccttctagtattctctggactcaagtctgacatatgagataataacctatattgaaatgccaagaattgtatctgaaacaagagaacagtttgacacatttatcatgccttcatattacatattaactgaaaccaattaataaacatatgaaatatccattgcacaaggcaaaggcacctaaaccttttgtttctttttctacatagcagaaattgattttttttttatttttttaggggaacctatataattatgacccagtgatgtcttttggtgacttaagcttatgaattcaggttacaattgagttgattctagatggttactaccttgaaaaggatgttggtgccttatgtgacacgagccagagcctgctgggaataaacaaagcagattcatgccaacaccaactcgtagctttagtggcagatgggagtggtcacagactcccaaaatgtggggctttggatttccacaccatcccacgtgtgtgtcatcttcctctttcacactcttgatgataatttgaaaatgatgaaatcacctctgaatttgcctatagcatgagcacattcttatgacaacataacaaatagttcataatgtgaatattagaaactgttacagcctgcagttaccataattttccatgtttgtggaattgatattgaaatagcagggctaaggaattactggcaagttttagcctgtgggtaataccttagggttatttaaatatttgtaattttatttaaatgttcatgaatgtttgaaaggaacaaaattatcagggatggctctttgccatgggtcttattttcaccctcttttctgtaagaaaaaagaacaatgtcttaatgtatttttaaagtttttggtatagtttctaattccaattttaataaaagttttatagat

SEQ ID NO: 181 - DNA, 1809 bp, Homo sapiens
  ref <308>: DATABASE ACCESSION NUMBER: U50196
  ref <309>: DATABASE ENTRY DATE: 2001-06-18
cgccttccctccaatcagcaccggggccggctagccaggggccggccgcgcggggtgtgtgaggacgcgctcccagtcgctgagtgcctgagccgggaagcagttgctgtggtacctgcgctgcccgagcggacgtagagcatcggacgcgggcgccgtggcgttgggcaggaggcgaagccaatgacgtcagtcagagaaaatattctctttggaatgggaaatcctctgcttgacatctctgctgtagtggacaaagatttccttgataagtattctctgaaaccaaatgaccaaatcttggctgaagacaaacacaaggaactgtttgatgaacttgtgaaaaaattcaaagtcgaatatcatgctggtggctctacccagaattcaattaaagtggctcagtggatgattcaacagccacacaaagcagcaacattttttggatgcattgggatagataaatttggggagatcctgaagagaaaagctgctgaagcccatgtggatgctcattactacgagcagaatgagcagccaacaggaacttgtgctgcatgcatcactggtgacaacaggtccctcatagctaatcttgctgctgccaattgttataaaaaggaaaaacatcttgatctggagaaaaactggatgttggtagaaaaagcaagagtttgttatatagcaggcttttttcttcacgtttccccagagtcagtattaaaggtggctcaccatgcttctgaaaacaacaggattttcactttgaatctatctgcaccgtttattagccagttctacaaggaatcattgatgaaagttatgccttatgttgatatactttttggaaatgagacagaagctgccacttttgctagagagcaaggctttgagactaaagacattaaagagatagccaaaaagacacaagccctgccaaagatgaactcaaagaggcagcgaatcgtgatcttcacccaagggagagatgacactataatggctacagaaagtgaagtcactgcttttgctgtcttggatcaagaccagaaagaaattattgataccaatggagctggagatgcatttgttggaggttttctgtctcaactggtctctgacaagcctctgactgaatgtatccgtgctggccactatgcagcaagcatcataattagacggactggctgcacctttcctgagaagccagacttccactgatggaagagctgaaaacacaagcccaggagtgcagacactgccctaattgcttcctgacaattcccatattaataaagaagaaaattatctgccattttttcctactataataatgctgaatcttaatttagagggtacaagggtatggtaatgcttgtagaatctttattatctcaacaatctaaaaaatgatgtttatttccatagtttgatagtgccacttaaatgccaattaaacaagaatataacatttcaatagaaatttttatttcattttcaattactttgtaaattcgtgtgtatttagtacactgatttgttttttacatttctgctttgaatgcagatgcaatttaatataatagattttttaatgaattaatcttaacatagtaatctttagctttttatacaaatatatttaatttaggagtatatgtgtgtctatacacacacatacataaatataccacatatacacctgatagtcaaataaggtacagaaattttatcttgtcaattatgccaaataatctctttaatgtgcactcaacatgtaataaactttggataattaaaaaaaaaaaa

SEQ ID NO: 182 - DNA, 5076 bp, Homo sapiens
  ref <308>: DATABASE ACCESSION NUMBER: D83777
  ref <309>: DATABASE ENTRY DATE: 2001-06-18
gcggccgcagcctcagcaccgcagagcggagagcggagcccggagcccgccgccccaggatggctgcagctcctccaagttactgttttgttgccttccctccacgtgctaaggatggtctggtggtatttgggaaaaattcagcccggcccagagatgaagtgcaagaggttgtgtatttctcggctgctgatcacgaaccggagagcaaggttgagatttaagttctcaaaggtggctgcaccaaatcccatcccaagtgcccttcttccagtgtgaagggcactccttccacgaagagggaaagtgcacttacatttcaatcgaccaagttccaaggacctatgccataatgataagcagacccgcctggctctggggagcagaaatgggagccaatgaacatggagtgtgcatagccaatgaagccatcaacaccagagagccagctgccgagatagaagccttgctggggatggatctggtcaggcttggtttagaaagaggggaaacagctaaagaagccttagatgtcattgtctccttgttggaagaacatggacaaggtgggaattactttgaagatgcaaactcctgccacagcttccaaagtgcatatctgattgtggatcgtgatgaagcctgggtgctcgagaccatagggaagtactgggctgccgagaaagtcacagagggagtgaggtgcatttgcagtcagctttcgctcaccactaagatggatgcagagcatccggaactcaggagttacgctcagagccaaggttggtggacgggagagggcgagttcaatttttccgaagtcttttctccagttgaggatcatctagactgcggtgctggcaaagacagcttagaaaaacaagaagaaagcatcacagtgcagactatgatgaacaccttacgggacaaagccagcggagtgtgcatagactctgagtttttcctcaccacagccagtggagtgtctgtcctgccgcagaatagaagctctccgtgcattcactacttcactggaacccctgatccttccaggtccatattcaagcctttcatctttgttgatgacgtaaaacttgtccccaaaacacagtctccctgttttggggatgacgaccctgccaaaaaggagcctcggttccaggagaaaccagaccgccggcatgagctgtacaaagcccacgagtgggcacgtgccatcatcgaaagtgaccaggagcaaggtcgcaagctgaggagcaccatgctggagctggagaagcaaggcctggaagccatggaagaaatcctgaccagctccgagccactggaccctgcggaagtgggggaccttttctatgactgtgttgacacggagattaagttctttaagtgaagtaagcgttccctttccccttcttatttaagacttcccaccttactaaattaccagcaaaacaaaccactctcctgtttgagtaaaatgagaaagttaatatgtggcctccttttctgaagccagatcaaactgttaccttgtgttccaccttgaatctcacagcgtccccttctgcaatgtaggtctccttcctgtgcagtgtaacatgtatcccgttgcctgttgttcggttgtgtgactaattgtggattttaagctgctattattgtatttcagtggcaatggacacattagccttttacaagaggactagagttcatcaagccttgaaaggcaggcttcacagtgccgagttggcgggaaaagcaaattcttttgaagtcttagtctttccctcagtagcggtttctttcaggttaacaagaggcatttgtgcacacacacagggctcttgtgtgtgttgtcaaggggaccctccgtggcctcccgtgagtgcatgcctgtagtgcacagtgtctctacaggtgtcttctggggggcagaaccaattggaaggaagaaagggacccctctccagtcctggctccttcctacatcctgggctcctgaagaagctgtcttcccattttccatgcgctgtgcttatgtgtggtggactgcagagctgcttccacttacaggagagctgataatttgttagctggaacctattcacttccgagattcagacatagccatgctggtggccttctgaatcactgcatggatgtcccaggaggcagctctccccacacagcagcacagccatcacaggattccttgtgtagaaatgattcccagtctagttaccaacagctagtctaggagtaattgaatggccctatggcacagttccacccacagagtagtgaatctctcagccaaggagggaaagaaaaggaagaactcttgactatttagattctagttaaatatctggaatcctagcagtcactacattatctcagcagagagactttaattaaactgatttgtttccaatgtcgggttcacttaaaggatttgacttaccaccagagcatagaaaagcatgcaaggaagaccagatgggcttagcattgggaagacagagggcaaggaggtgatagatggatatagaagcatttctctgcaggataccagttcaggccccaccattcctgccaaggccattacatcccacaaacccaaatacaaagcagctgacttccctggatcttccccccactcctcacacctcacatgtcccaggagctgccttcattcaggcgggtagctgcactgggcatggggtggtggtgggagcttaccgccacctattcaagctctcagctactcctgaaacgggcagagatgatgaacagaagtgtatgtaaatacagcagctagtgggagagcaccagttgggcctaatcctgcctcatcattcttggcaggaatctgcaaatggaaacattgtgagtatcagcaatctgggaagtgacagggttaataactccttcccagaagctgtatcatgagattttgaggggaccgagccctgttacatggatgtgaacagtgaggatcagaggttttatcagaacacattctttttttctaccaactctccagagcgtgagtataggagtgccatgagctttttagtcagcagttttgtaaactctgtatataaaatcattaaccacacattgtgggtgatgggaagacgatttcagctgacagagttaatggcaaccaataatggtggcctgtagctgctaagagcttcacgcaggtttggcctgggctttcactgttggtgaatttagagtgtccttttaggtggggcggctattctaaaagtgtctttctatcactgttaagggggggggaaagtgaggttcgaggatgacgtaggtaactctcccctcccaagtccatgttccaagtggctatgtaaagcaagatgatacagaaagctgctctaaaatctcactgagtgatttcaccttcgcctactatgaaatgtctcatcagacctgacatgtctgagataaccaaggtgattcaggatttgatcaaaagaagtctagtaagaattaattacacagaagcctcctttcatttctatgggccaaacaaaggccatggataaccctacccgctttatgtcattacccattgggaaacacaatggctacttctgttagggtacattgaccttggtcaagcatcttaaagaaggcaaccctaattgagagctgtcttggctaatactctgcaccacaattgtgatgtcctagtcctaccactagagggcatggtacagcctggcaaaagttaaaaggggtgtggcagctcccatcaggtctggaggtggtctataagcacagttgacagttgtgcattgggatgggtggagaaagacgacaagagagcagagaatctgctgatgtggctgcgcttacttttagtgactttatgtacttatattaacagctggaaataggttgttgggttttgagcaggctgttatagtgaggaatgttcatttttaaatgttcctaacagattttgcttttgaaaaatgcttgttacatgaataatttgtggaccagggattgcttttctgaaggcagtatagggaacatgaatattcaagatgaaatacaaaaattatgtttaagggtcatagtgtataagtagcttcctaggaaaccctttgtgtatcttttcagactggggtgggggctgagcatgcttgtgcagaaagaagccatagccagaaaggacagaatctctcccccactcccttgccccataaccaaacataagctagctagtcttgtctaatagatgggatttactataggtgaagatagccctcatattcaaggacagaagctctggcaggagtaaattagcaaagcagaaatagtaccctttcattcttggaggtgctttgaaattttaggtagaatataatcgaaattatggaggttccttagtgctcaataatataagacctggtgttattagaacgagtctttcttataaactaacagagcaggtatatgcctgttagaccttagctgtggggttcctttactattgggtgaatcattaggtataaaaaataatcatcaaccaggcaaattactttgcttcctagctgatgtcatcccacattggtacaggtgttattcagtactgggtggttcagcagggaagccgggtgggaccagtgtgtctgtcatgaaaccactaactgcattcctgactgaagagccatctgtcatttattggggaaggtcttcagttgagctctcagccttaggaaggaagcacgtggaggagggacggaggaggttcccttgctgggcatgcttcgtagagggccaggagcagcaggtcatgtgcacatgccgttgcagcacaagcttatgcttcccgtagccgtggcttttcattctgcacagtcccaggtcccagctcccctcttatggtttctgtcataatgtgctttatctgattgactccaaacatcccgaaatgtcacctgcagatttctcgtgggaaccaatatgtacatgtttgcaattatgctgtgagaatttaaatgtgttagatggaaaatgctattggcagggaataataat

SEQ ID NO: 183 - DNA, 2738 bp, Homo sapiens
  ref <308>: DATABASE ACCESSION NUMBER: U75362
  ref <309>: DATABASE ENTRY DATE: 2001-06-18
cgcggaattccgcggaattccgcgccgccgccgccggcagaccccgcgctccggctccggctcggctcgctcggctccggtgcgcgccgaggccatgcagcgccggggcgccctgttcggcatgccgggcggcagcggaggcaggaagatggctgcaggagacatcggcgagctgctagtgccccacatgcccacgatccgcgtgcccaggtccggcgacagggtctacaagaacgagtgcgccttctcctacgactctcccaattctgaaggtggactctatgtatgcatgaatacatttttggcctttggaagggaacatgttgaaagacattttcgaaaaactggacagagtgtatacatgcacctgaaaagacatgcgcgagagaaggtaagaggggcgtctggtggagcgttaccaaaaaggaggaattccaagatttttttagatctagatactgatgacgatttaaatagcgacgattatgaatatgaagatgaagccaaacttgttatattcccagatcactatgaaatagcactaccaaatattgaggagttaccagccctggtaacaattgcttgtgatgcagttctcagctcaaaatctccatacagaaagcaggacccagacacgtgggaaaatgaattgccagtatctaaatatgccaacaacctcacccagctggacaatggagtcaggattcctccaagtggttggaagtgtgccagatgcgacctgcgagaaaacctctggttgaatctgactgacggctctgtcctgtgtggaaagtggttctttgacagctctgggggcaacgggcatgcgctggagcattacagagacatgggctacccactagccgtgaaactgggaaccatcactcctgacggggcagatgtttattcttttcaagaagaagaacctgttttggatcctcatttggccaagcacttagcgcattttggaattgatatgcttcatatgcatgggacagagaatgggctccaggacaatgacatcaagctgagggtcagtgagtgggaagtgatccaggagtcgggcacgaaactgaagccaatgtatggtcctggctacacgggtctgaagaacctgggcaacagctgctatctcagctctgtcatgcaggccatcttcagcatcccagaattccagagagcgtatgtaggaaaccttcccagaatatttgactactcgcctttagatccaacacaagatttcaacacacagatgactaagttaggacatggccttctctcaggccagtattcaaagcctccggtgaaatctgaactcattgaacaggtgatgaaggaggagcacaagccacagcagaacgggatctctccgcgcatgtttaaggcctttgtaagcaagagccacccggaattctcctctaacaggcagcaagatgcccaggaattcttcttgcacctggtgaatctagtagagaggaaccgcatcggctcagaaaacccaagcgatgtttttcgttttttggtggaagaacgcattcagtgctgtcagacccggaaagtccgctacacggagagggtggattacctgatgcagttacctgtggccatggaggcggcaaccaacaaggatgaactgatcgcttatgaactaacgagaagggaagcagaagcaaacagaagaccccttcctgagttggtacgtgccaagataccatttagtgcctgccttcaggccttctctgaaccagaaaatgttgatgatttctggagcagtgccctacaagcaaagtctgcgggtgtgaaaacatctcgctttgcttcattccctgaatacttggtagtgcagataaagaagttcacttttggtcttgactgggttcccaaaaaatttgatgtttctattgatatgccagacctacttgatatcaaccatctccgagccagggggttacagccaggagaggaagaacttccagacatcagcccccccatagtcattcctgatgactcaaaagatcgcctgatgaaccaattgatagacccatcagacatcgatgagtcatcagtgatgcagctggccgagatgggtttcccgctggaagcatgtcgcaaggctgtgtacttcactggaaatatgggcgccgaggtggccttcaactggatcattgttcacatggaagagccagattttgctgagccgctgaccatgcctggttatggaggggcagcttctgctggagcctctgtttttggtgcttctggactggataaccaacctccagaggaaatcgtagctatcatcacctccatgggatttcagcgaaatcaggctattcaggcactacgagcaacgaataataacctggaaagagcactggattggatctttagccaccctgagtttgaagaagacagtgattttgtgattgagatggagaataatgccaatgcaaacattatttctgaggccaagcccgaaggacctagagtcaaggatggatctggaacatatgagctatttgcattcatcagtcacatgggaacatccacaatgagtggtcattacatttgccatatcaaaaaggaaggaagatgggtgatttacaatgaccacaaagtttgtgcctcagaaaggccccctaaagacctgggctacatgtacttttaccgcaggataccaagctaaacctcaaatataaaaattggcgaaaagaagccatacgcctttttaatttgcc

SEQ ID NO: 184 - DNA, 10524 bp, Homo sapiens
  ref <308>: DATABASE ACCESSION NUMBER: D26350
  ref <309>: DATABASE ENTRY DATE: 2001-06-18
cttccagctcccgccggcgctgtgacggccgagcggtcgcagagcagggagtggacacgaggtgggagcggagagggaaggaggaggaggaggagcaaaggtgttggagagaaaacttcagaaaggaacaggaaacctgccggggagcgggcggcggctgcggcttctctgggcgcctgggctgcctcttcgcggggtgtcccgagctggcgcttggccccggtctggcttccccggcgcgcaccacggctgagcgcgacgctcagtggctcgggccgtgcctccgccgtggctcttggccgctgtagtcccgcgatccgatccgcttctgccgcggcggctccctggagagagggcggcgagggcgcagggaagaagagggacgtccactgtggaacatgaagcagcatgaagcagcatgactgagaaaatgtccagcttcctctacataggggacatcgtgtccctgtacgcggagggctcggtcaacggcttcatcagcaccttggggttagtggatgacagatgtgtggtgcacccagaggccggggaccttgccaaccctcccaagaagttcagagactgccttttcaaggtgtgccctatgaacagatattctgcccagaagcaatattggaaagcaaagcaagccaaacaagggaaccacaccgaggcagccttgctgaagaaactacagcacgctgcagaactggaacaaaaacaaaatgaatcggagaataagaaactgttgggagaaattgtaaaatacagtaatgttatacaactactgcatataaaaagcaacaaatatcttactgtcaacaagagattacctgctttactggagaagaatgccatgcgtgtgtccttggatgctgcaggaaatgaagggtcttggttttatattcatccattctggaaactgagaagcgagggtgacaatattgttgtaggagataaagttgttttgatgcctgtgaatgcagggcagccactacatgccagcaacatagagcttcttgataacccagggtgtaaagaggtgaatgctgtcaattgcaacaccagctggaaaatcactttattcatgaaatatagttcctatcgagaggatgtattaaaaggaggggacgttgttagattatttcatgcggaacaagagaagtttttgacttgtgatgaatatgagaaaaaacagcacattttccttcgtacgaccttgcgccaatcagctacttctgctactagttctaaagcactctgggaaatagaggtggttcatcatgacccatgccgtgggggtgcaggacagtggaacagcttgttcagatttaagcatcttgcaactggaaactatttagctgcagagcttaatcctgattatcgagatgcccaaaatgaaggaaaaaatgtgagagatggagtccctccaacttcaaagaaaaaacgccaggcaggggagaagatcatgtatactttggtttcagtcccgcatggcaatgacattgcatccctttttgaactagatgccacaactcttcagagagctgactgcctggttccaaggaactcatatgttcggttaaggcatttatgcaccaacacatgggtaaccagtactagtatccccatagacacagatgaagagaggcctgttatgttaaagattggaacctgccaaaccaaagaagataaagaagcgttcgcaatcgtgtctgttccactgtctgaagttcgagacttagactttgccaatgatgccaataaagtactagcgaccacagttaaaaagctagaaaacggcacaataactcagaatgaaaggaggtttgtaaccaaattattggaagatctcatattctttgttgctgatgtgcctaataatggacaagaagttctggatgtggttatcactaagccaaaccgagagcgtcaaaaattgatgagggaacaaaacatactggcacaggtatttggaattcttaaagcaccctttaaagagaaagcaggagaaggctcgatgctgagacttgaagatctgggggatcaaagatatgcaccctacaagtacatgctgcggctctgttaccgcgtcctgagacactcgcagcaggattaccggaaaaatcaggaatatattgctaagaatttctgtgtcatgcagtcccagattggctatgatattttggcagaagatactatcacacctttgttgcacaacaacagaaaactactagagaaacatatcacagcaaaagaaatagaaacatttgtcagtttactcaggagaaatcgggagccaaggtttttggattatttgtcagatctgtgtgtgtctaataccactgctatccctgtaactcaagaactcatctgtaaatttatgttgagtccaggcaatgcagacattctcattcaaactaaggtggtctcaatgcaagcagacaaccccatggagagctccatcctttcagatgacattgatgatgaagaagtttggctctattggattgacagcaacaaggaacctcatggcaaagctatcaggcaccttgctcaagaggcaaaagaaggcaccaaagctgacttagaagttcttacctattacaggtaccagctaaacctctttgcaaggatgtgcttggatcgccagtatctggccataaaccagatttctacacagctgtctgtagacctgatcctgcggtgtgtgtcggatgagagcctgccgttcgacctccgagcgtccttctgtcgcctcatgctccacatgcacgttgaccgggatccccaggagtccgtggtgcctgttcgctatgccaggctctggacagaaatccccacaaagatcacaattcatgaatatgattctataacagactcttccagaaatgatatgaagaggaaatttgccctgacaatggaatttgttgaagaatatttgaaagaagttgtaaaccagccctttccttttggggataaagaaaaaaataaactgacatttgaggtggtccacttggctcggaatcttatatactttggattttatagtttcagtgagttattaaggctaacaagaacacttctggctattttagacattgtacaggcccccatgtcatcatactttgaaagattaagcaaatttcaagatggaggaaacaatgtgatgagaaccattcatggggtgggagagatgatgacccagatggtactcagtagaggctccatcttccccatgagcgtgccggatgtgccacccagcatccacccgagcaagcaagggagccccaccgagcatgaggatgtgactgtgatggacaccaagctgaagatcattgagattttgcagtttatcctgagtgtcagactggattataggatctcatatatgctgtcaatatataagaaggagtttggagaggacaatgacaatgcggagacatctgccagtggatctccagacactttactaccatcagctattgttcctgatatagatgaaattgcagctcaggcagaaactatgtttgcgggaagaaaagaaaaaaatccagttcaacttgacgatgaaggaggcaggacgtttttacgggtcctcattcatctgatcatgcacgactacgcgcctttgctgtctggagccctgcagctgttgtttaagcacttcagccagagggcagaggttttacaggcatttaagcaggtgcaattactggtgtctaatcaagacgtagataactacaagcaaatcaaggcagatctagaccagcttcgactgacagtagaaaagtctgagctatgggtggagaagagcagcaactatgagaatggagaaataggggaaagtcaagtgaaaggtggtgaagagccaattgaggaatcaaacattttaagtccagtgcaggatggaacaaagaaacctcagattgacagcaacaagagcaataagtaccggattgtaaaggagattttgatcaggctaagtaaactctgtgtgcagaataaaaagtgtcggaatcaacatcaacgattactgaaaaatatgggggcgcattcggtggtgttggatcttctgcagataccctatgaaaagaatgatgaaaagatgaatgaagtaatgaatctagcccatacatttctgcagaatttctgtcgaggaaatccacagaatcaagttcttcttcataaacatctgaatttgtttttaactccaggtctccttgaagcagaaaccatgcggcacatcttcatgaacaattaccatctgtgcaacgaaattagcgagagagttgtacaacactttgtgcactgcattgagacacatggccgccacgtggagtacctgaggtttttgcaaacaattgtaaaagcagatggtaaatatgtgaagaaatgccaggatatggtaatgacagagttgataaatgggggtgaagacgtgctgatattttacaatgatagagcatcatttccaatccttctccatatgatgtgttcagagagagaccgaggggatgagagtggccccttagcctaccacatcaccctggtggagttgctggcagcatgcacagaggggaaaaatgtctacactgaaatcaagtgtaattcccttctcccgctggacgacatagtgagggtggtgacccatgacgactgcatccctgaggttaaaattgcttatgtgaactttgttaatcactgttatgttgacactgaagtggaaatgaaagaaatctatacaagtaaccacatttggaaattatttgagaacttcttggtggatatggcaagggtttgcaacacaactacagacaggaaacatgcagacatctttttggaaaagtgtgttactgagtcaataatgaatattgtgagcggcttctttaattctcccttttcagacaatagtaccagcctccagacacatcagccagtttttattcagctactgcaatctgccttcagaatttacaattgcacctggccaaacccagcgcagaaagcctcagtggaatcctgtatcagaactttggctgaagtggcaaaaaatcgtggaattgccattccagtggatttggacagccaagttaatactcttttcatgaagagccattcaaatatggtgcagagagcagcaatgggttggagactatcagctcgctctgggccacgctttaaggaagctcttggagggcctgcttgggattacagaaatattattgaaaagttacaggatgtagtggcctccttggagcaccagttcagcccaatgatgcaggctgaattctcagtgttggttgatgtattgtacagtccagaactgctgttccctgagggaagcgatgcaagaataagatgtggcgctttcatgtcgaagttgattaatcatacaaagaaactaatggagaaagaagaaaaactgtgcattaaaattcttcagacattacgagaaatgttagagaagaaagacagctttgtggaagagggtaacacattaagaaagatacttctgaatcgatactttaaaggtgattatagtattggtgtgaatggacacctatcaggagcctactccaaaactgcacaggtgggaggaagcttttctggacaagattcagataagatggggatatcaatgtcagacattcagtgtctgctggataaagaaggtgcatcagaacttgtcatcgatgttatagtgaacaccaaaaatgacagaattttttcagaaggcattttcctcggcattgccttgcttgaaggaggaaatacacaaacacagtattctttctaccagcagttgcatgaacaaaaaaagtcagaaaaattctttaaagttctctatgatcgaatgaaggctgctcagaaagaaataagatcaacagtgacagttaataccatagatttaggtaacaaaaaaagggacgatgacaatgaattgatgacatctggtccacgaatgagagtaagagattcaacactacatttaaaagagggaatgaaagggcaattaacagaagcttcttcagcaacatccaaagcatattgtgtatacagaagagaaatggatccagaaatagacattatgtgcacaggaccagaagcgggaaacactgaggaaaaatccgcagaggaagtaacaatgagtcccgcaattgccatcatgcagccaatactgagatttcttcagttactgtgtgagaatcacaaccgggaattgcagaacttcttgaggaatcaaaacaacaaaacaaattacaacctagtctgtgagacccttcagtttctggactgcatttgtggaagtacaaccggtggcctgggcctgttgggtctctacatcaatgagaagaatgtagcgctggtcaaccagaacctggagagcttgactgagtattgccagggcccttgccatgaaaatcagacctgtatcgctacacatgagtctaatgggattgatatcatcattgctttgattctgaatgacataaaccctcttggtaaataccgaatggacctggtgctccagctaaagaacaatgcatctaaacttttgctggccattatggaaagcagacatgacagtgagaatgcagaaagaattctttttaacatgagacccagagaactggtggatgtgatgaagaatgcctataaccaaggattggaatgtgaccatggggatgatgagggtggagatgatggtgtttctccaaaagatgttggacacaatatctatattctggcccatcagttggcccgccacaataaactgttgcagcagatgctcaaaccaggatcggatccagatgaaggagatgaagccttaaagtattatgccaaccacactgcacagattgagattgtccggcatgataggaccatggaacaaatagtttttcctgtccccaatatatgtgaatacctcactcgagaatccaagtgccgtgtgttcaatacaactgaaagggatgaacaaggaagtaaagtgaatgactttttccagcaaacagaagatctctacaatgaaatgaagtggcagaagaaaatcaggaataaccctgcactgttctggttctcgaggcacatctctctctgggggagcatttccttcaacctggctgtgttcatcaatttagctgttgctctcttctacccatttggggatgatggagatgaaggtacactttctccattgttctcggttcttctttggatagcagttgcgatctgcacatctatgctgtttttcttctccaagcctgtgggtattcggccgtttcttgtatcaataatgctcagatcaatatatacaataggtcttgggcctacattaatacttcttggtgcagctaatctttgtaataaaattgtttttctggtgagttttgttggaaatcgtggcacgttcacccgtgggtaccgagcagtcatcctggatatggcctttctctatcacgtggcgtatgtcctggtttgcatgctgggcctttttgtccatgaattcttctatagcttcctgctttttgatttggtgtacagggaagagactttgctgaatgtcataaaaagtgtcacacgaaatggccgctctattattctaactgcagtcctggctctcatcctcgtctacctgttttccattattgggttcctttttttgaaggatgacttcactatggaagttgataggctgaaaaaccgaactcctgttacaggcagtcatcaagtgcctactatgactttaactaccatgatggaagcatgtgccaaggagaactgttcacccacaattccagcttcaaatacagctgatgaagagtatgaagatggaattgaaaggacgtgtgacactctccttatgtgcattgtcaccgtgctgaaccagggcctcaggaatggcggtggtgtgggggatgtgctaagaaggccatcgaaagatgagcctttgtttgctgcccgagtggtttatgaccttcttttttatttcattgttatcattattgttctgaacttgatttttggtgttatcatcgatacttttgctgatctcagaagcgaaaaacagaaaaaagaagaaattctaaagacaacttgtttcatctgtggacttgagagagacaagtttgataataaaacggtttcatttgaggagcacattaagtcagaacacaatatgtggcattatttgtacttcatagtcctggtgaaagttaaagacccaacagaatacactggacctgaaagttatgtggctcaaatgattgtggagaagaatttggattggtttcctcggatgcgagccatgtccctcgttagcaatgaaggcgacagtgagcaaaatgaaattcggagccttcaggagaagttggaatcgaccatgagtctggtcaaacagctgtcgggtcagctggcggagctcaaggagcagatgacagaacaaaggaagaataagcagagactgggcttcctcggatcaaacacaccccatgtgaatcatcacatgccaccacactgataccatggggggaagccgtgactagcctttcatcagtgtcctgcctgatcactgaataaagaactgagatggaggggagtgaacagtgcctattgttgaaaagttaaaaacaaccaagtgccaagatgttgagtgggttagctccgagaacaatttataactgtgttttcatggttgcgaagacctaacctcaaatgcatctgctagaaagcgtacatcacacattcgcaatgcatcaggaagaaaaggcttgcccaaaaggctggagagggcagggagcggcaggatggaaggagacacggggcagggagaactctcttctgctaaatcgataggagtcagttttgtcttaaatgctgactacagccactgacatggttggctggaatttcttcttttaattgtggcatataggtttgtgacacaagaagtcatactttggtggctaagttttactaaggaaaataactgaaaagattaaaagtgagagctgaaaagagaaatgataatgcttccaaactgtagctgtcacagggcaatttctttatttataacatgaagcacaatggatttacagctctaggaacttagtactttggagcttttgcctctcacactgacaacataacaggatgtgattgccttctctgggattcagacaggctctgtcaatgtggagcacaaaaggagattttcatataacttgttaaaaacatgttctaagtcatgtataggctaagattttaagaagatctgggggaataaaaagccaacagtaagccccaggaaagggttttttgagaccatatgtatgctattaaaatatattgagattaatacatgaaaatgcttaaaagtgataggaattattgagaaacttatgatggtggcattgccttttataaacatggagtgaaagccatttgactcaacgtttgctgtgcttaaagaattgcttcaggacccgagcgtttttatgtatgctgttcctgcagttaggaaaaaaaaatccaagaaatgtattgaatactcaagaaaatgccacatttcaattacatatttaaaactgtatctgtaagggcttttcaaaatgtagcaagataaaaatctcttattcaaattgtttttgtattaaatcatgcactcagaatttgtcgagggagagaataacctggtgtgttcaggttattcttagagactacacatttggaatagcagagcaaaatatggataatgaaagtgttgggaaaaaagtgatgtgacagggagtgaagacacttgataccagactctgggagatactctgcaagttgacctggcctctcccccacaggaacaaaacactgcctccagagtctttaaattctcagttatcaacgccaaggtttaaggtctagatagggtttgctatagggtttgctctgacaatttttaaagcttttggattgttctaacatagcttaagctattggttcctaaaaatcccaaatcaagatctatgtagaatataaaggaagcctgaaccaatccttccacatactgttaagatgtagacttggaacaaagctgttgggacccagagcaatgaatttttgaactgaagctactggtactccccagcaccacctcatactaagaattcctcactctgacatgacagtattttttctgaccaggagctgaaagaccctgacattcatgatccaaagatataagaaattttgatatgtctgcatgcagcacagaactttgaacctaggaggcagtcaataaatacatgagaaattcagctgtcattcagttactcttaattctttataaaactttaaatgataccacatatttgtttgtttaaaatggctttcccaaaatcaaagtagactaaagcagccatctttaaaatccaggatcatcaatgctattaacagtatcaggtaaaaagtacactttaaaatattttaatcaggcagagttttatggataggagatgtactcactcg

SEQ ID NO: 185 - DNA, 3248 bp, Homo sapiens
  ref <308>: DATABASE ACCESSION NUMBER: M98343
  ref <309>: DATABASE ENTRY DATE: 2001-06-18
gcctggtgcctgggagcggctggcgcggcggaatccagggccgacccgggccggaccgaccccaggcggcgacggaatcagtccccaatgcctggaaattcctcattggattactgtgttttaaacagaatttcgtgaacagccttttatctccaagcggaaagaaagatgtggaaagcttcagcaggccacgctgtgtccatcgcccaggatgacgcgggggccgatgactgggagaccgaccctgattttgtgaatgatgtgagtgagaaggagcaaagatggggtgccaagacggtgcagggctccgggcaccaggagcatatcaacatacacaagctgagggagaatgtctttcaagagcatcagacccttaaggagaaggaacttgaaacaggaccaaaagcttcccatggctatggagggaaatttggtgtggaacaagaccgaatggataagtcagctgtcggccacgaatatcagtcgaaactttccaagcactgctcgcaggtggactcggtccgtggcttcggaggcaagtttggtgtccagatggacagagttgatcagtctgctgtaggctttgaataccaggggaagactgagaagcatgcctcccagaaagactactccagtggttttggcggcaagtatggcgtgcaggccgaccgagtagacaagagcgcggtgggcttcgactaccagggcaagacggagaagcacgagtcacagagagattactccaaaggtttcggcggcaaatacggtatcgacaaggacaaagtggataagagcgccgttggctttgagtatcaaggcaaaacggagaagcacgagtcccagaaagactatgtgaaagggtttggaggaaaatttggtgtgcagacagacagacaagacaaatgtgcccttggctgggatcaccaggagaaattgcagctgcatgaatcccaaaaagattataagactggttttggaggcaaattcggtgttcagtcggagaggcaggactccgctgctgtggggtttgattacaaggagaagctggccaagcacgagtcccagcaagactactccaaaggattcggcgggaagtatggggtgcagaaggatcggatggataagaatgcgtcaacctttgaggatgtcacccaggtgtcctctgcctaccagaagacagtacctgtcgaagctgtgaccagcaaaacaagtaacatcagagctaactttgaaaacctcgctaaggagaaagagcaggaggacaggcggaaggcggaggcggagagagcccagcggatggccaaggagcggcaggagcaggaagaggccaggaggaagctggaggagcaagccagagccaaaacgcaaacgccccctgtgtcgcccgcacctcagccaaccgaggagaggctgccctcgagccccgtctatgaggatgcggcttccttcaaggcagagctgagctacagaggccctgtgagtgggacggagccggagcccgtgtacagcatggaggccgctgactaccgagaggccagcagccagcagggcctggcctatgccacagaggctgtctatgaaagcgcagaggccccgggccactatcccgcagaggacagcacctacgatgagtacgagaacgatctggggtacacagccgtcgccctgtacgactaccaggctgcgggcgatgatgagatctcatttgaccctgatgacatcatcaccaacatcgagatgattgacgacggctggtggcgcggggtgtgcaagggccggtacgggctcttcccagccaactatgtggagctgcggcagtagggcccccagcccccccccggagctggcgccctggatcctcacactacagatcaggccttctttggttcttgggtggttttgggttttttctgttttttttttttttttttttttttttttttgaaggtggggaggggaatatacacattgcttttatatttaatacttttgctgatgcttttgaaaatgtttatgccacagaatttgctaatatattgtaatcacattccttaggaggactttggtaattggttttatgcattgatggttttttttttcttttttgccaaattgactgtcacgcggcagcttcagggagctcgcattctcttgtgttcgtgttgccctcgtgcccatcaagtgcagtcgggacctcccaggacaagcacgagcctcaggtcggccctgtggcgggtaggcaggaaggactgtcccagacgaggggcttcctctagagtctcactgctggggaggagaggactgggcctgatggaagttaacccggagctaagtcacccagagcacaggagctgccatgtcagatgggaaatctgcctatgtcataccgtgacagcccgcaggatcaggtgacttctagcagagaccctggtttttttcctgtgcccactccggcttgtcctcatctctacccatcccctgatgcccaggtcaccgggagggctgctgggagcctctcctgtccccgccggcagtgtcactgagtccttgaaatcctcccctgcccgcgggtctctggattgggacgcacagtgcagttgaggtctgcgtcgggcttggcttttcacaaaggctgatgtcttaactgtcacccatatggtccctgggccaccgggcagcctggggcggtgtgtgtgccatgtcacagcatggcctctcggccttgggaaggaaggcagtgtgcctgctctgctgtgagccgccaggaaccctcctcctgtcaatgggggtgtagtatttttgccaaaatatcatgttcaatttcagtagtttgatcagttgaaggctagaagtgtgaagtgcagatgagtgtgtgttcttccccaaggtccccccacagctccaggacaccgctgtcctggcatttgtggccactcactttgtaggaaactcatctccttcctgaggagccgggaggctggaccagtcccgtcgtgcagtcaggtgggcggtgtgtctttccagaaggtcacgtggaaatgtctcgggacttgggtcccggagtgcccgtgaagcgtgtttttgctcctgaggtgcattttctcatcatccttgctttaccacaatgagcaatgaggtcgggttttatatgcaacttattgtatctgaattcctgtaggcacaccctccatagggtatgattttttttaaattaaagaattcagaataaacattttttgatccaaaaa

SEQ ID NO: 186 - DNA, 772 bp, Homo sapiens
  ref <308>: DATABASE ACCESSION NUMBER: AI151265
  ref <309>: DATABASE ENTRY DATE: 2001-06-18
tgtcatttacagtagaataaatattttgttgctattgctacactttaatttacattctaacctattaaatgcagaaagctagtgtaaagcatatagattaagtgtaggtcccatacgtatgacagtttgttcaagactagtaggtttttgtttttgtatctttttttaacttattaaatggctagtgggaaagatttgtgcttgtgatcagctcttaacttcaatttttacatcaaaacgtccctgaaaacggtctttctcactgtacccaatgttctcaccgtacgccttacactctatgcgaatttcagtgtccatggtaagattggtgaactgtacggccagcaggggctgcaggtatttgggctgcaggagtttgccatagtacggataatactgcagaggaaaaccaggggagttgcccagtccaaaatacttcacatttccaactttatccttatcttcatctcgcttgccagtgcactgaacgggaaggacatttgggttatacttcatcactgggtaagtctccaaggactcattcttgggaggcttaggtttgaagcctagaactcggttgagctttataataatgcacggtttgccctctttgtagcccataagtttcatcatttaatccagagcaaattcccagccattcaagcttgaatctggaagacctttcgcttctcctcgttcatgaataaaagcctcctcggtttcttccgttcaattgggcacaatcgccacaattcttcaaaaatcatgtcat

SEQ ID NO: 187 - DNA, 6030 bp, Homo sapiens
  ref <308>: DATABASE ACCESSION NUMBER: M14745
  ref <309>: DATABASE ENTRY DATE: 2001-06-18
gttggcccccgttacttttcctctgggaaatatggcgcacgctgggagaacagggtacgataaccgggagatagtgatgaagtacatccattataagctgtcgcagaggggctacgagtgggatgcgggagatgtgggcgccgcgcccccgggggccgcccccgcgccgggcatcttctcctcgcagcccgggcacacgccccatacagccgcatcccgggacccggtcgccaggacctcgccgctgcagaccccggctgcccccggcgccgccgcggggcctgcgctcagcccggtgccacctgtggtccacctgaccctccgccaggccggcgacgacttctcccgccgctaccgccgcgacttcgccgagatgtccaggcagctgcacctgacgcccttcaccgcgcggggacgctttgccacggtggtggaggagctcttcagggacggggtgaactgggggaggattgtggccttctttgagttcggtggggtcatgtgtgtggagagcgtcaaccgggagatgtcgcccctggtggacaacatcgccctgtggatgactgagtacctgaaccggcacctgcacacctggatccaggataacggaggctgggatgcctttgtggaactgtacggccccagcatgcggcctctgtttgatttctcctggctgtctctgaagactctgctcagtttggccctggtgggagcttgcatcaccctgggtgcctatctgggccacaagtgaagtcaacatgcctgccccaaacaaatatgcaaaaggttcactaaagcagtagaaataatatgcattgtcagtgatgttccatgaaacaaagctgcaggctgtttaagaaaaaataacacacatataaacatcacacacacagacagacacacacacacacaacaattaacagtcttcaggcaaaacgtcgaatcagctatttactgccaaagggaaatatcatttattttttacattattaagaaaaaaagatttatttatttaagacagtcccatcaaaactcctgtctttggaaatccgaccactaattgccaagcaccgcttcgtgtggctccacctggatgttctgtgcctgtaaacatagattcgctttccatgttgttggccggatcaccatctgaagagcagacggatggaaaaaggacctgatcattggggaagctggctttctggctgctggaggctggggagaaggtgttcattcacttgcatttctttgccctgggggctgtgatattaacagagggagggttcctgtggggggaagtccatgcctccctggcctgaagaagagactctttgcatatgactcacatgatgcatacctggtgggaggaaaagagttgggaacttcagatggacctagtacccactgagatttccacgccgaaggacagcgatgggaaaaatgcccttaaatcataggaaagtatttttttaagctaccaattgtgccgagaaaagcattttagcaatttatacaatatcatccagtaccttaagccctgattgtgtatattcatatattttggatacgcaccccccaactcccaatactggctctgtctgagtaagaaacagaatcctctggaacttgaggaagtgaacatttcggtgacttccgcatcaggaaggctagagttacccagagcatcaggccgccacaagtgcctgcttttaggagaccgaagtccgcagaacctgcctgtgtcccagcttggaggcctggtcctggaactgagccggggccctcactggcctcctccagggatgatcaacagggcagtgtggtctccgaatgtctggaagctgatggagctcagaattccactgtcaagaaagagcagtagaggggtgtggctgggcctgtcaccctggggccctccaggtaggcccgttttcacgtggagcatgggagccacgacccttcttaagacatgtatcactgtagagggaaggaacagaggccctgggcccttcctatcagaaggacatggtgaaggctgggaacgtgaggagaggcaatggccacggcccattttggctgtagcacatggcacgttggctgtgtggccttggcccacctgtgagtttaaagcaaggctttaaatgactttggagagggtcacaaatcctaaaagaagcattgaagtgaggtgtcatggattaattgacccctgtctatggaattacatgtaaaacattatcttgtcactgtagtttggttttatttgaaaacctgacaaaaaaaaagttccaggtgtggaatatgggggttatctgtacatcctggggcattaaaaaaaaaatcaatggtggggaactataaagaagtaacaaaagaagtgacatcttcagcaaataaactaggaaatttttttttcttccagtttagaatcagccttgaaacattgatggaataactctgtggcattattgcattatataccatttatctgtattaactttggaatgtactctgttcaatgtttaatgctgtggttgatatttcgaaagctgctttaaaaaaatacatgcatctcagcgtttttttgtttttaattgtatttagttatggcctatacactatttgtgagcaaaggtgatcgttttctgtttgagatttttatctcttgattcttcaaaagcattctgagaaggtgagataagccctgagtctcagctacctaagaaaaacctggatgtcactggccactgaggagctttgtttcaaccaagtcatgtgcatttccacgtcaacagaattgtttattgtgacagttatatctgttgtccctttgaccttgtttcttgaaggtttcctcgtccctgggcaattccgcatttaattcatggtattcaggattacatgcatgtttggttaaacccatgagattcattcagttaaaaatccagatggcaaatgaccagcagattcaaatctatggtggtttgacctttagagagttgctttacgtggcctgtttcaacacagacccacccagagccctcctgccctccttccgcgggggctttctcatggctgtccttcagggtcttcctgaaatgcagtggtgcttacgctccaccaagaaagcaggaaacctgtggtatgaagccagacctccccggcgggcctcagggaacagaatgatcagacctttgaatgattctaatttttaagcaaaatattattttatgaaaggtttacattgtcaaagtgatgaatatggaatatccaatcctgtgctgctatcctgccaaaatcattttaatggagtcagtttgcagtatgctccacgtggtaagatcctccaagctgctttagaagtaacaatgaagaacgtggacgcttttaatataaagcctgttttgtcttctgttgttgttcaaacgggattcacagagtatttgaaaaatgtatatatattaagaggtcacgggggctaattgctggctggctgccttttgctgtggggttttgttacctggttttaataacagtaaatgtgcccagcctcttggccccagaactgtacagtattgtggctgcacttgctctaagagtagttgatgttgcattttccttattgttaaaaacatgttagaagcaatgaatgtatataaaagcctcaactagtcatttttttctcctcttcttttttttcattatatctaattattttgcagttgggcaacagagaaccatccctattttgtattgaagagggattcacatctgcatcttaactgctctttatgaatgaaaaaacagtcctctgtatgtactcctctttacactggccagggtcagagttaaatagagtatatgcactttccaaattggggacaagggctctaaaaaaagccccaaaaggagaagaacatctgagaacctcctcggccctcccagtccctcgctgcacaaatactccgcaagagaggccagaatgacagctgacagggtctatggccatcgggtcgtctccgaagatttggcaggggcagaaaactctggcaggcttaagatttggaataaagtcacagaatcaaggaagcacctcaatttagttcaaacaagacgccaacattctctccacagctcacttacctctctgtgttcagatgtggccttccatttatatgtgatctttgttttattagtaaatgcttatcatctaaagatgtagctctggcccagtgggaaaaattaggaagtgattataaatcgagaggagttataataatcaagattaaatgtaaataatcagggcaatcccaacacatgtctagctttcacctccaggatctattgagtgaacagaattgcaaatagtctctatttgtaattgaacttatcctaaaacaaatagtttataaatgtgaacttaaactctaattaattccaactgtacttttaaggcagtggctgtttttagactttcttatcacttatagttagtaatgtacacctactctatcagagaaaaacaggaaaggctcgaaatacaagccattctaaggaaattagggagtcagttgaaattctattctgatcttattctgtggtgtcttttgcagcccagacaaatgtggttacacactttttaagaaatacaattctacattgtcaagcttatgaaggttccaatcagatctttattgttattcaatttggatctttcagggattttttttttaaattattatgggacaaaggacatttgttggaggggtgggagggaggaacaatttttaaatataaaacattcccaagtttggatcagggagttggaagttttcagaataaccagaactaagggtatgaaggacctgtattggggtcgatgtgatgcctctgcgaagaaccttgtgtgacaaatgagaaacattttgaagtttgtggtacgacctttagattccagagacatcagcatggctcaaagtgcagctccgtttggcagtgcaatggtataaatttcaagctggatatgtctaatgggtatttaaacaataaatgtgcagttttaactaacaggatatttaatgacaaccttctggttggtagggacatctgtttctaaatgtttattatgtacaatacagaaaaaaattttataaaattaagcaatgtgaaactgaattggagagtgataatacaagtcctttagtcttacccagtgaatcattctgttccatgtctttggacaaccatgaccttggacaatcatgaaatatgcatctcactggatgcaaagaaaatcagatggagcatgaatggtactgtaccggttcatctggactgccccagaaaaataacttcaagcaaacatcctatcaacaacaaggttgttctgcataccaagctgagcacagaagatgggaacactggtggaggatggaaaggctcgctcaatcaagaaaattctgagactattaataaataagactgtagtgtagatactgagtaaatccatgcacctaaaccttttggaaaatctgccgtgggccctccagatagctcatttcattaagtttttccctccaaggtagaatttgcaagagtgacagtggattgcatttcttttggggaagctttcttttggtggttttgtttattataccttcttaagttttcaaccaaggtttgcttttgttttgagttactggggttatttttgttttaaataaaaataagtgtacaataagtgtttttgtattgaaagcttttgttatcaagattttcatacttttaccttccatggctctttttaagattgatacttttaagaggtggctgatattctgcaacactgtacacataaaaaatacggtaaggatactttacatggttaaggtaaagtaagtctccagttggccaccattagctataatggcactttgtttgtgttgttggaaaaagtcacattgccattaaactttccttgtctgtctagttaatattgtgaagaaaaataaagtacagtgtgagatactg

SEQ ID NO: 188 - DNA, 4431 bp, Homo sapiens
  ref <308>: DATABASE ACCESSION NUMBER: D50406
  ref <309>: DATABASE ENTRY DATE: 2001-06-18
gtcgacccacgcgtccgcccacgcgtccggcggcggcggtagcggcggcagcggctgcggccaagctgggtccgagcatcccgcggctctggagccgcccggcccggacatggcgaccgtccgggcctctctgcgaggtgcgctgctccttctgctggccgtggcgggggtcgcggaggtggcagggggcctggctccgggcagtgcgggtgcattgtgttgtaatcattcaaaggataaccaaatgtgccgtgatgtatgtgaacagattttctcctcaaaaagtgaatcccgactaaaacatctgttgcagcgagccccagattattgcccagagacaatggttgaaatttggaattgtatgaattcatctttgccaggtgtgtttaagaagtctgatggctgggttggcttaggctgctgtgaactggctattgccttggagtgtcgacaggcatgcaagcaggcatcttcaaagaatgatatttccaaagtttgcagaaaagaatatgagaatgctcttttcagttgcattagcagaaatgaaatgggctcggtttgttgcagttatgcaggtcatcacacaaactgccgagaatactgtcaagccatttttcgaacagactcttctcctggtccatctcagataaaagcagtggaaaattattgcgcctctattagtccacaattaatacattgtgtgaacaattatactcaatcttatccaatgaggaacccaacggatagtttatattgctgtgacagagctgaagaccatgcttgccaaaatgcctgcaagagaatcctgatgtccaagaaaacggaaatggagattgttgatggtctcatcgagggttgtaagacccagcccttgcctcaagatcctctttggcaatgttttcttgaaagctcacaatctgttcaccctggagtcactgtacaccctcctccctctacaggcctcgatggggctaaattgcattgttgttctaaagcaaacacttcaacatgtagggaactctgcactaaactttacagcatgagctggggcaatacacagagttggcaagagtttgatcgcttttgtgaatataatccagtggaagtgtccatgttgacctgtttagcggatgtccgggaaccttgccagttgggctgtagaaaccttacttactgtactaattttaacaacaggccaacagaacttttcaggagttgtaatgcacagtcagatcaaggagccatgaatgacatgaagttgtgggagaaaggaagcataaagatgccatttatcaatatacctgttcttgatattaaaaagtgccagccagagatgtggaaagcaatagcttgttcactgcagattaaaccttgtcatagtaaatctcggggaagtattatttgcaaatcagattgtgtggagattcttaaaaaatgtggagaccagaacaaattccctgaagaccacacagctgaaagtatttgtgagcttctgtcacctacagatgatctgaagaattgtatacctttggatacatacctcaggccaagtactttaggtaacattgtagaagaagtgactcatccctgtaacccaaatccttgccctgccaatgagctctgtgaagtaaaccgaaaaggatgtccatctggagatccctgtcttccatacttttgtgttcaaggttgcaaactgggagaagcttctgatttcattgtccgtcaagggacactaatccaggtgccatcatctgcaggggaagttggttgttataaaatctgttcatgtggacaaagtggactcttagaaaactgtatggaaatgcactgtatagacctccagaagtcttgtattgttggaggaaaaagaaaaagtcatggaacatcctttagtattgactgcaatgtctgttcttgttttgctggcaatttggtgtgctctacccgcctttgcctcagtgagcacagttcagaagatgaccgtcgtaccttcacaggtctgccctgtaactgtgcagatcagtttgtccctgtatgtgggcagaatgggcgcacttaccccagtgcctgcattgctcgctgtgtgggcctccaagaccatcagtttgagtttggatcatgcatgtcaaaggatccatgtaatcctaatccctgccaaaaaaaccaaaggtgcatacccaaaccacaggtctgcctgacgacttttgataaatttggatgtagccagtatgagtgtgtaccaagacagctcgcgtgtgaccaggtccaagatcctgtttgtgacacagaccacatggagcacaacaatctctgcactttataccaaagaggaaaaagcctctcttacaaaggtccctgccagcccttttgcagagcaaccgagcccgtatgtgggcacaatggtgagacctacagcagtgtgtgtgctgcctactcggatcgcgtggcagtcgattactatggggactgccaggccgtcggagtcctctcagagcacagctccgtcgccgagtgtgcttctgtcaagtgtccttcgctcttggcagctggatgcaaacccatcatcccaccgggtgcttgttgcccattatgtgctgggatgttaagagttttatttgacaaagaaaaactggatactattgctaaggtaacaaataaaaagccaataacagttctggaaatacttcagaaaatccgcatgcacgtgtctgtcccacagtgtgatgtgtttggatacttcagcattgaatcagaaattgtgatcctgatcattcccgtcgatcactatccaaaagctctgcagattgaagcctgcaataaagaagcagagaagattgagtcccttatcaactctgacagcccgactttggcgtcccatgtccctctctctgccctcatcatttcccaggtacaggtctccagcagtgtgccatcggccggtgtcagggccaggccttcttgccactccctcctccttcccctcagcttgggccttgccttgcacttgctctggacatataactgactgcccacggaaagtgcagaatgctcctccacctcactctcctgccttgaaaaagacattcaggactgctggtttgtagttgaatattggccaaggaaaggcacatgtcacctctattcgccacacagtatttttttttttaatccgccaatattagtaggatttttgttttgtttttacaaatgttaaaatgtgttgttccaaatactaatgaaaacagaatgtctcttcctggtagaccactgccatatgatttacatttcctcaccataagggtcccccactctaaagcaaatttatcgctgggaaatgagatgaccactttttagaaagataattcactgtactatcaggttcacaaacttcatttcagagttctttttgaagtatttaaggttcccgttgcatttgttttgtttacagataattacctactctggctagaagctaggggtcccagtgaagagccactgccattaaagaatatgaaacatagataaaacatctttgaaattatgtaaattatgtaaattatcaggcaaatttgcattaaattacagaaatttaattcagaaccccaactactgtgttatgcaaaagcaagctgattaaatgacactcatataattatatgttgtaagcaacaggctcactggtcacggatttgtgtctgtgacttttgtgaaagggagaagtgacattgcatcaaagcatcttgcattatgcaatttttatattaaccagatatatattcatcggtattcatccaagttaaatgtagagtttttaaacatcaatctttaaaccaattgctgctacttatataattgccaaaaagtgaaataatgtgtagttcatgtaaataatacattatatttctattttattatgaagaaggtgaatagccatatttgtaaaatgacaatcatgtgtgttaacccagtgctttccattcgtgaaaacacatttgctttttgtgatatgcacaatgtagataagtgttctgtctgactttcttttttgatatagaagtataaagaattgtggtttatatatttaaaagtgtcaagctgagtattaaaatgtatgcatgttgtctaagaaattgaatacttgaatgtgtctcacagtttgaaataagctatttgatgtaatacttcttgtgtgtatgcacatgaaacttagattttacatgaagtattttttcagtattatatgtaccctctgaaatacatagggatatgcgtattataccaaaatgttgctgaaaaatgggcacttaaagctttcagaatatgtcagtgctgatgtagcatgcttgttgcaattgccttttttctgtataaatgtctttaatgcaatatactggaaagcttttctattttaataaaaataatttttatatg

SEQ ID NO: 189 - DNA, 571 bp, Homo sapiens
  ref <308>: DATABASE ACCESSION NUMBER: AI279820
  ref <309>: DATABASE ENTRY DATE: 2001-06-18
tttgttatgttaaagttttattaagtttcaatacaaaacattccaaaaaaaaaaaagtgatctataatacccaagttctatgttcaactaccagttaaacaaggaaaacattttctgtatcattctgttttacaaccagtataaacccagaagaatcaagatctgattccttttccacacatctgctaggtcagtaaactatcaaacaggtatctggtcattttaacatactccttatattcctatttggtacaatctctatatcctatactatcttcaagatatctaaatatcttaaatatttagggtatctcaagagccagaaggtcctcacagaagcgttaacccaagtaatcgtaagagtatagaaagattgggctaagacaactatggagtgcaaaaaccacataaatttggtcattacccttgtggtctgtgattagtagtaggttgtcaaatgagagttaaaaatgttgtattatccctagttgcaaatgttccaaataagacagtgccataactacacgacaaaaaaaaaaaaaaaatcatataagttgggttagttcctcta

SEQ ID NO: 190 - DNA, 1480 bp, Homo sapiens
  ref <308>: DATABASE ACCESSION NUMBER: M57730
  ref <309>: DATABASE ENTRY DATE: 2001-06-18
gcggagaaagccagtgggaacccagacccataggagacccgcgtccccgctcggcctggccaggccccgcgctatggagttcctctgggcccctctcttgggtctgtgctgcagtctggccgctgctgatcgccacaccgtcttctggaacagttcaaatcccaagttccggaatgaggactacaccatacatgtgcagctgaatgactacgtggacatcatctgtccgcactatgaagatcactctgtggcagacgctgccatggagcagtacatactgtacctggtggagcatgaggagtaccagctgtgccagccccagtccaaggaccaagtccgctggcagtgcaaccggcccagtgccaagcatggcccggagaagctgtctgagaagttccagcgcttcacacctttcaccctgggcaaggagttcaaagaaggacacagctactactacatctccaaacccatccaccagcatgaagaccgctgcttgaggttgaaggtgactgtcagtggcaaaatcactcacagtcctcaggcccatgtcaatccacaggagaagagacttgcagcagatgacccagaggtgcgggttctacatagcatcggtcacagtgctgccccacgcctcttcccacttgcctggactgtgctgctccttccacttctgctgctgcaaaccccgtgaaggtgtatgccacacctggccttaaagagggacaggctgaagagagggacaggcactccaaacctgtcttggggccactttcagagcccccagccctgggaaccactcccaccacaggcataagctatcacctagcagcctcaaaacgggtcagtattaaggttttcaaccggaaggaggccaaccagcccgacagtgccatccccaccttcacctcggagggacggagaaagaagtggagacagtcctttcccaccattcctgcctttaagccaaagaaacaagctgtgcaggcatggtcccttaaggcacagtgggagctgagctggaaggggccacgtggatgggcaaagcttgtcaaagatgccccctccaggagagagccaggatgcccagatgaactgactgaaggaaaagcaagaaacagtttcttgcttggaagccaggtacaggagaggcagcatgcttgggctgacccagcatctcccagcaagacctcatctgtggagctgccacagagaagtttgtagccaggtactgcattctctcccatcctggggcagcactccccagagctgtgccagcaggggggctgtgccaacctgttcttagagtgtagctgtaagggcagtgcccatgtgtacattctgcctagagtgtagcctaaagggcagggcccacgtgtatagtatctgtatataagttgctgtgtgtctgtcctgatttctacaactggagtttttttatacaatgttctttgtctcaaaataaagcaatgtgttttttcgg

SEQ ID NO: 191 - DNA, 2036 bp, Homo sapiens
  ref <308>: DATABASE ACCESSION NUMBER: U30521
  ref <309>: DATABASE ENTRY DATE: 2001-06-18
tttcctctttctctaagagtctctctctccctttccctctctctccccccaatctgtctttctagcatgttgccctttttcaaccacatttgtgtttcaggtgtagagaggagagagagtgaacagggagcggggcttttgtctgttggtctccctggactgaagagagggagaatagaagcccaagactaagattctcaaaatggtttattacccagaactctttgtctgggtcagtcaagaaccatttccaaacaaggacatggagggaaggcttcctaagggaagacttcctgtcccaaaggaagtgaaccgcaagaagaacgatgagacaaacgctgcctccctgactccactgggcagcagtgaactccgctccccaagaatcagttacctccactttttttaatcgtaacacctccatttgtattacatatggtgtatgggtattgatgaggtcatggtatcatatatgggatttttttctgtgtaaatcatcaagtataagaagaaactatgggactctgagccttgctttagagaatttacagtggacaaataggtgtcatcaaaccagtttttaatcattctgactcaagtgaaaacgctcagaatttcacactgtgaatccacgtttacaacccttacaggtgggccttcaggcctggttcgctacaacaatgtcttccacaactcaaactcccaccgcgctcacacaaccggtccactcctgccttttcactcacacagctcccgactgcttcttgcagaggctgagagtccccccccccacctttttttttcatttagatgtaacaaacctagtagtttatgttcatcaattgtctgtatatctctatattttatccatgtactcttttgatgtatagaagtagtttgaaactcattgtttccttgtggtaagtgaccgagatgctgccacaggacctgagacactgatgaatggtgctattttggactttcaacatgctccttggcgaggtagctctgatggagttattttttatttccatgttctaagaaggtgttggtactctgtttccctgaatgttgttctctagactggattgacttgttttccttgtgtcttcagtgtggctttcttcctcagtgttgtaggttgagcgaatgctaccagagtgtgagagaccattgtctcgttggctggcgctcacggacatgcagtcacggtagcgggagcaatcacaaaactgtaatttacttaccaaatctcttcctttccgtagcctcgcctgcctgacttagagaaagaaaagcaataattttacaggcattttgaggtgtctctttgggttctttctgtttgaaaggatatttgtcgaaaaaaagagcaaaaccgttttaaataaactccccctggaaaaaaacccaaaacactggcatctgagtaggaatatgaaaatgacaccttttccaaatattaaattggaaaacaaggtctacaaaatcatgatacttttttaaaaggcagagcattcttttttcggcaattttgataagcaaggtgtagatttacatttttgtccttgctcccaacgaaatggataaacaaaaataaattaccatctactcatggaatgttgttgtgttagccagtctgaaagcccaccttaatttttatataactgtctttagctcttcttttgacagggcaggccttgttctgaactgtttcgcttctgactgttaaacaccgatgacgcatgcactgcacttcttcgttttcttcttgctcccccattggcctgagtttcttgtgcattactcctctccctccttcgttagaataggtatatcagctgtgtaaatagagcaagaaaacagtattctgcatctgtggcatttatgtagagttgcagttgtgtactgctgaaaatgcaggcttttgtaacagtgtgatctttactgatgcactcatgacaagtacccaatgtattttagctattttagtagtatttgttcaataaatacgcaagctgtaaggtaactgtctg

SEQ ID NO: 192 - DNA, 520 bp, Homo sapiens
  Modified_base 1 ... 520: n = a,c,g, or t
  ref <308>: DATABASE ACCESSION NUMBER: R45293
  ref <309>: DATABASE ENTRY DATE: 2001-06-18
tttttttttttctacctaggtaaccttcaatttattctctgttgttatatcttatttttctttctcacatttgcacttatgattttttagggtccaaaactccttcctaaatatcaagtgaagtcatttcttaccccatgctgttccctggagacccctgtggattctcagctttatagatatgtgaagattgggctgactaaccttttagggagcaagattatatttngctccaaaagtgttgacaccctattgttatacaataggtaagtagtgtaaggagttttgttgttttaaacctaaggcatcctgttcgattttgggaganatatgggacttagaagcaatagaagttctctgggaaatgcaaaatgggaatgggtcccttccctgaagggcaagttgggggttagcaggcagagccntttgagtccaagactgttngggggttnaagtcccaaattttagccncgtagtaggcagaatatcccggggcagaattatttaacccttttccgct

SEQ ID NO: 193 - DNA, 2921 bp, Homo sapiens
  ref <308>: DATABASE ACCESSION NUMBER: AF042282
  ref <309>: DATABASE ENTRY DATE: 2001-06-18
gcacgaggtgccacatgcgatctctgagatatgtacacagtcattcttactatcgcactcagccattcttactacgctaaagaagaaataattattcgaggatatttgcctggcccagaagaaacttatgtaaatttcatgaactattatatccgttttcctcggagtgagagaaaactctttttagatatcatctgagaggtagttaatttggcaccatggggatacagggattgctacaatttatcaaagaagcttcagaacccatccatgtgaggaagtataaagggcaggtagtagctgtggatacatattgctggcttcacaaaggagctattgcttgtgctgaaaaactagccaaaggtgaacctactgataggtatgtaggattttgtatgaaatttgtaaatatgttactatctcatgggatcaagcctattctcgtatttgatggatgtactttaccttctaaaaaggaagtagagagatctagaagagaaagacgacaagccaatcttcttaagggaaagcaacttcttcgtgaggggaaagtctcggaagctcgagagtgtttcacccggtctatcaatatcacacatgccatggcccacaaagtaattaaagctgcccggtctcagggggtagattgcctcgtggctccctatgaagctgatgcgcagttggcctatcttaacaaagcgggaattgtgcaagccataattacagaggactcggatctcctagcttttggctgtaaaaaggtaattttaaagatggaccagtttggaaatggacttgaaattgatcaagctcggctaggaatgtgcagacagcttggggatgtattcacggaagagaagtttcgttacatgtgtattctttcaggttgtgactacctgtcatcactgcgtgggattggattagcaaaggcatgcaaagtcctaagactagccaataatccagatatagtaaaggttatcaagaaaattggacattatctcaagatgaatatcacggtaccagaggattacatcaacgggtttattcgggccaacaataccttcctctatcagctagtttttgatcccatcaaaaggaaacttattcctctgaacgcctatgaagatgatgttgatcctgaaacactaagctacgctgggcaatatgttgatgattccatagctcttcaaatagcacttggaaataaagatataaatacttttgaacagatcgatgactacaatccagacactgctatgcctgcccattcaagaagtcgtagttgggatgacaaaacatgtcaaaagtcagctaatgttagcagcatttggcataggaattactctcccagaccagagtcgggtactgtttcagatgccccacaattgaaggaaaatccaagtactgtgggagtggaacgagtgattagtactaaagggttaaatctcccaaggaaatcatccattgtgaaaagaccaagaagtgcagagctgtcagaagatgacctgttgagtcagtattctctttcatttacgaagaagaccaagaaaaatagctctgaaggcaataaatcattgagcttttctgaagtgtttgtgcctgacctggtaaatggacctactaacaaaaagagtgtaagcactccacctaggacgagaaataaatttgcaacatttttacaaaggaaaaatgaagaaagtggtgcagttgtggttccagggaccagaagcaggtttttttgcagttcagattctactgactgtgtatcaaacaaagtgagcatccagcctctggatgaaactgctgtcacagataaagagaacaatctgcatgaatcagagtatggagaccaagaaggcaagagactggttgacacagatgtagcacgtaattcaagtgatgacattccgaataatcatattccaggtgatcatattccagacaaggcaacagtgtttacagatgaagagtcctactcttttaagagcagcaaatttacaaggaccatttcaccacccactttgggaacactaagaagttgttttagttggtctggaggtcttggagatttttcaagaacgccgagcccctctccaagcacagcattgcagcagttccgaagaaagagcgattcccccacctctttgcctgagaataatatgtctgatgtgtcgcagttaaagagcgaggagtccagtgacgatgagtctcatcccttacgagaaggggcatgttcttcacagtcccaggaaagtggagaattctcactgcagagttcaaatgcatcaaagctttctcagtgctctagtaaggactctgattcagaggaatctgattgcaatattaagttacttgacagtcaaagtgaccagacctccaagctatgtttatctcatttctcaaaaaaagacacacctctaaggaacaaggttcctgggctatataagtccagttctgcagactctctttctacaaccaagatcaaacctctaggacctgccagagccagtgggctgagcaagaagccggcaagcatccagaagagaaagcatcataatgccgagaacaagccggggttacagatcaaactcaatgagctctggaaaaactttggatttaaaaaattctgaaaagcttcctccttgtaagaaacccctgtccccagtcagagataacatccaactaactccagaagcggaagaggatatatttaacaaacctgaatgtggccgtgttcaaagagcaatattccagtaaatgcagactgctgcaaagcttttgcctgcaagagaatctgatcaatttgaagtccctgtttgggaatgaggcacttatcagcatgaagaattttttctcattctgtgccattttaaaaatagaatacattttgtatattaactttaaaaaaaaaaaaaaaaaaa

SEQ ID NO: 194 - DNA, 1484 bp, Homo sapiens
  ref <308>: DATABASE ACCESSION NUMBER: U65410
  ref <309>: DATABASE ENTRY DATE: 2001-06-18
tggaagcgcgtgcttttgtttgtgtccctggccatggcgctgcagctctcccgggagcagggaatcaccctgcgcgggagcgccgaaatcgtggccgagttcttctcattcggcatcaacagcattttatatcagcgtggcatatatccatctgaaacctttactcgagtgcagaaatacggactcaccttgcttgtaactactgatcttgagctcataaaatacctaaataatgtggtggaacaactgaaagattggttatacaagtgttcagttcagaaactggttgtagttatctcaaatattgaaagtggtgaggtcctggaaagatggcagtttgatattgagtgtgacaagactgcaaaagatgacagtgcacccagagaaaagtctcagaaagctatccaggatgaaatccgttcagtgatcagacagatcacagctacggtgacatttctgccactgttggaagtttcttgttcatttgatctgctgatttatacagacaaagatttggttgtacctgaaaaatgggaagagtcgggaccacagtttattaccaattctgaggaagtgcgccttcgttcatttactactacaatccacaaagtaaatagcatggtggcctacaaaattcctgtcaatgactgaggatgacatgaggaaaataatgtaattgtaattttgaaatgtggttttcctgaaatcaggtcatctatagttgatatgttttatttcattggttaatttttacatggagaaaaccaaaatgatacttactgaactgtgtgtaattgttccttttatttttttggtacctatttgacttaccatggagttaacatcatgaatttattgcacattgttcaaaaggaaccaggaggtttttttgtcaacattgtgatgtatattcctttgaagatagtaactgtagatggaaaaacttgtgctataaagctagatgctttcctaaatcagatgttttggtcaagtagtttgactcagtataggtagggagatatttaagtataaaatacaacaaaggaagtctaaatattcagaatctttgttaaggtcctgaaagtaactcataatctataaacaatgaaatattgctgtatagctccttttgaccttcatttcatgtatagttttccctattgaatcagtttccaattatttgactttaatttatgtaacttgaacctatgaagcaatggatatttgtactgtttaatgttctgtgatacagaacagattaatactccctttttatcattacagttagctaaaaaattgccaggcagtccacaaaacagaatttgctttaagaccaacccacagagtcagctggagactaacggcgctggggcctgctgggccgggatatagtcgtgtttagctaagtgtcgagagcattaagaagaaagtcctggttggaggcgcaaggcctgcagcaccagctgtggaatccccaataatgt

SEQ ID NO: 195 - DNA, 853 bp, Homo sapiens
  ref <308>: DATABASE ACCESSION NUMBER: J04164
  ref <309>: DATABASE ENTRY DATE: 2001-06-18
ctagtcctgacttcacttctgatgaggaagcctctctccttagccttcagcctttcctcccaccctgccataagtaatttgatcctcaagaagttaaaccacacctcattggtccctggctaattcaccaatttacaaacagcaggaaatagaaacttaagagaaatacacacttctgagaaactgaaacgacaggggaaaggaggtctcactgagcaccgtcccagcatccggacaccacagcggcccttcgctccacgcagaaaaccacacttctcaaaccttcactcaacacttccttccccaaagccagaagatgcacaaggaggaacatgaggtggctgtgctgggggcaccccccagcaccatccttccaaggtccaccgtgatcaacatccacagcgagacctccgtgcccgaccatgtcgtctggtccctgttcaacaccctcttcttgaactggtgctgtctgggcttcatagcattcgcctactccgtgaagtctagggacaggaagatggttggcgacgtgaccggggcccaggcctatgcctccaccgccaagtgcctgaacatctgggccctgattctgggcatcctcatgaccattggattcatcctgtcactggtattcggctctgtgacagtctaccatattatgttacagataatacaggaaaaacggggttactagtagccgcccatagcctgcaacctttgcactccactgtgcaatgctggccctgcacgctggggctgttgcccctgcccccttggtcctgcccctagatacagcagtttatacccacacacctgtctacagtgtcattcaataaagtgcacgtgcttgtga

SEQ ID NO: 196 - DNA, 513 bp, Homo sapiens
  ref <308>: DATABASE ACCESSION NUMBER: AA700158
  ref <309>: DATABASE ENTRY DATE: 2001-06-18
ataatgtgtatttattattcaaatagcttgacagcaaagtgttggaaaacgaagagcaggaattccgcggttcctgcccggcctcgccatccagctgggagaagagcatggtcatttccttcacttagtccacggccactcggcgctcatccccagcacagccctccccaggccgcggcaaagactgttgctgtcctgctgagggatgtgcccccggggattcaatcgagattctgtaagatgtgggggatgtggcggggtggggggtggcttctccacatccccagggctctccttcttccccagtgaggtgggagaagccgcagattggggtctgctgaggagcgggcctacatgaggcccaggtcgtgacccatggctccggggaccagaaggtaaacagtttcggcacagggtgctcccactaggtcataggtggattcagccttctctgagaaccgagaagattctggagtcttttgaagcaggaaaggagatcagaggaggagatgg

SEQ ID NO: 197 - DNA, 4152 bp, Homo sapiens
  ref <308>: DATABASE ACCESSION NUMBER: AF054589
  ref <309>: DATABASE ENTRY DATE: 2001-06-18
cccaggccggctctggcctcctgacccagacagcgcagggcgcgagggatcgcgcggccgagcccgggtcgcgccgctcccagcatcggggccgctagccaagagttcgaggccttcccgatccggatgtgatgaaaaagagcaacagagggagaagtgtttcaggattgtaggagtggaagaggggaaagagaggcagagagggggaaggccccctcgcaggggagccggctggagtgagctggctggaaagagggggcggagtgcgcggagtcagagccgccaccgctgccgcagttgccgccactgcggcgtctgggctgagccggagggaggcgggaggacgcgcaggggcggccgccgccgtcgtcaggccaccggggcgaaaatgcggccgctgccggaggctcgctaactttccggggcggaagaggaggaggaggaggaggaaggggcttggagcgactacggggggatgcggagaagcagtcagttccctgcacccagcacctcacagcccttcctccgtgcgccctgccgggcggcgagctaggcggcagcggcgcggcgcgggctcggcggagcggcccatgtccggcgcgggcgaagccctcgctcccgggcccgtggggccgcagcgcgtggccgaggcgggcggcggccagctgggctccacagcccagggaaaatgtgataaagacaatactgagaaagatataactcaagctaccaatagccacttcacacatggagagatgcaagaccagtccatttggggaaatccttcggatggtgaactcattagaacccaacctcagcgcttgcctcagcttcagacttcagcacaggtgccaagtggtgaggaaataggcaagataaagaacggccacacaggtctgagcaatggaaatggaattcaccacggggccaaacacggatccgcagataatcgcaaactttcagcacctgtttctcaaaaaatgcatagaaaaattcagtccagcttgtctgtaaacagcgatatcagtaagaagagcaaagtaaatgctgtcttttcccaaaagacaggctcttcacctgaagattgttgtgtccactgtatcctggcttgcttgttctgcgaattcctgaccctttgcaacattgtcctgggacaagcgtcatgtggcatctgcacctcagaagcctgctgctgttgctgtggtgacgagatgggggatgattgtaactgcccttgtgatatggactgtggcatcatggatgcctgttgtgaatcatcagactgcttggaaatctgtatggaatgctgtggaatttgttttccttcataaatatttatcttttgtttgtgttaaaactggagagtgtttaaaaatttccttttggggggaagaaaagcacattgtaagattctcatgaaacaacatggaatttgcactgttaactcattattgtaagtaatctctgaaagcctttttactttaaccaaatctacatggtttaatatgtgaaattttaactactttaactagttttataaatttcttaatatgttacaataacttagggacattttgacaccccccttcccaaatgttaaatgccttctcctttttaccgatatttctgtttcttttaaccgttctcaggagcactttgctccaaatatattatttttcagtgtgtatttaaacgaggcagtttattttgatatgtatctattcatgattgaaaggaagcagtcttggccaggcacggtggcttacacctgtaaccctggcattttgggaggccaaggtgggcagattgcctgagctcaggagttcgagaccagccagggcaacatggtgaaaccccatctctactaaaatacaaaaagttagctgggcttggcggtgtgcgcctgtagtcccagctactcaggaggctgaggcaggagaattgcttgaacccgagaggcggaagttgcagtgagccgagattgtgccactgaactccaacctgcactccagcctgggcaacagagcgagactccatctctaaataaataaataaataaataaataaataaataaataaataaataaacaaaccagtctttattttaaaagaaactttaggaaacaaacccacataatagttgggaaccagtgttgatctctctcccttaccttctccacttgttcaacagactctgaatgccgactgtgtggactctcttcctcagactgtggggacagatacaattccactcctgtccacaggaacatgagatttagcagactaaggagatctgtaaagaatgaaccataccacaaggcatactgaagtgaggattataagagaaataaactcaaaatgctgttggaatatgcagagaattgctaccagaatattcagtaaggtttcagggagaatgtggcatttgaggactctcttagaatgagtgattcacctgctatttaaatgaattatttagatttttgacaaagatttaggtggacaccctaaactgtgtgtgcctttaaccagttaaaagaacagtgccttcagcatacttttttattagttgtaggaatacagctttttgaaaaagctataaagtttaaattaactaaaaatatgcattttcttacacataatttaaatgttatcatacttttttgatgaaaacataatgccttagtaaaatagctctatttaataaagaagattgagtactctgacacatttcatttaaattaggaaatttttaatattaaaatcccagtgttctgagttattgaaaggctttcttttattttgagagctttaggtctttttgggatgagaacattttagttgtttagtttgtttcttaagcagtgctattttttgtaaacacagataaatggaaaccattcttttcaatgcagaagaaatctagatatcccctactgtgaccaaatttctgtattacgattttatgttaaattaaactaatatggcaggttataatgatccttaagtgtaaagaaatcagtcaattacaagagtaattgtatagttattgagacctatagtgtgtggcttagatgaaagggagagtaaattttcataccatgctctctcctactcagtttgatctctctaaaattgtagtttggtttgatttaatataattcttagtagaaattttgaaagtatgctttgggattaataattatttttaatttttctggctgaatatcaaattgatagtaacaacagaagcataattttaggaaggctttcgcaaacctagccttttaagagaggtttttaacctgaagcatgagaatatatcacctgtggtttttcctttgagatgaaacgtagtttctagttatatcattacttaaagggcttaaaaagaaaaaacttagcaaacttttgaatctttcttttattgctatttacacatacatacacacatacaaaacctttaaattttgggatctgaatataattctggtaaacagctgtcttcatttttctcctctaaagaacttaattcatttgttacataaaatataaggaaatctttatactattttacagtaaccacaatctaaatatttacatatacccaaaattaacttatgctcatatattaggatgtgagaatatcatctgtttatggacacatgaaacctcctaatgacctggaattgttagaatatttgactttttatatgcaaagtttttcaaccaagtggtttgtctaatatttaaacatgtactggcacaatttgtgatgaaaatattagcacatttgcaataatgtttctccataacagagaatgttaatggataccagaattttatttttgtatttatgttcatagtacttttcctcttgtctactccagacagttattccataaagcatttgtataattaaaaggaaaacagaaaaaggaaaagtaggcaaatgtgaaaatagtttcaatatatcttatgatttcttaatgtaaaatgttttgttgaagtatatggctatcatgactaagtgctagaatttatagttacaggcggtgtccttttaaatgtggaaaggcttttaaaatattttaaaactggacctgtattatcctgaatacactattttgaaaatttttaagaaaaaaaaaa

SEQ ID NO: 198 - DNA, 1280 bp, Homo sapiens
  ref <308>: DATABASE ACCESSION NUMBER: U55206
  ref <309>: DATABASE ENTRY DATE: 2001-06-18
tgccgcagcccccgcccgcccgcagagcttttgaaaggcggcgggaggcggcgagcgccatggccagtccgggctgcctgctgtgcgtgctgggcctgctactctgcggggcggcgagcctcgagctgtctagaccccacggcgacaccgccaagaagcccatcatcggaatattaatgcaaaaatgccgtaataaagtcatgaaaaactatggaagatactatattgctgcgtcctatgtaaagtacttggagtctgcaggtgcgagagttgtaccagtaaggctggatcttacagagaaagactatgaaatacttttcaaatctattaatggaatccttttccctggaggaagtgttgacctcagacgctcagattatgctaaagtggccaaaatattttataacttgtccatacagagttttgatgatggagactattttcctgtgtggggcacatgccttggatttgaagagctttcactgctgattagtggagagtgcttattaactgccacagatactgttgacgtggcaatgccgctgaacttcactggaggtcaattgcacagcagaatgttccagaattttcctactgagttgttgctgtcattagcagtagaacctctgactgccaatttccataagtggagcctctccgtgaagaattttacaatgaatgaaaagttaaagaagtttttcaatgtcttaactacaaatacagatggcaagattgagtttatttcaacaatggaaggatataagtatccagtatatggtgtccagtggcatccagagaaagcaccttatgagtggaagaatttggatggcatttcccatgcacctaatgctgtgaaaaccgcattttatttagcagagttttttgttaatgaagctcggaaaaacaaccatcattttaaatctgaatctgaagaggagaaagcattgatttatcagttcagtccaatttatactggaaatatttcttcatttcagcaatgttacatatttgattgaaagtcttcaatttgttaacagagcaaatttgaataattccatgattaaactgttagaataacttgctactcatggcaagattaggaagtcacagattcttttctataatgtgcctggctctgattcttcattatgtatgtgactatttatataacattagataattaaatagtgagacataaatagagtgctttttcatggaaaagccttcttatatctgaagattgaaaaataaatttactgaaatacaaaaaaaaaaaaaaa

SEQ ID NO: 199 - DNA, 1608 bp, Homo sapiens
  ref <308>: DATABASE ACCESSION NUMBER: AF006484
  ref <309>: DATABASE ENTRY DATE: 2001-06-18
gcccccaccatcaaggggaagaaagtgctcttcggattccggttcgccctggcctcccgcagccgccgcgggaccggcccccagcacacccccggggcgccgggcgcggggcagccgcccggacgcgcgcgggcctcaggcgccgccgggaccccagccccccaaactttggcaagttgcgggcgccgagcgcacccggaggcgcggggcgcggccgcaggcggagccgccccctgacgccgggccgccccctcccggccccggccgccccgccggctccgcggaaagtttgcggccgcccctgcgccgcacccggggcctgggtgagactgcggcggcggcagggcgcggacggccatatttgccggcgcggcccgagccgccgacaacaaaaagtgcgcgggcgctcggcgggcgctcggacgggcgcggggctgcagcgctaccgcccggcctcgccgccgccgccgccgccctcgcggcctggccccgccgcgcccggcgcgcccgccgcccggggggatgtcttacaaaccgaacttggccgcgcacatgcccgccgccgccctcaacgccgctgggagtgtccactcgccttccaccagcatggcaacgtcttcacagtaccgccagctgctcagtgactacgggccaccgtccctaggctacacccagggaactgggaacagccaggtgccccaaagcaaatacgcggagctgctggccatcattgaagagctggggaaggagatcagacccacgtacgcagggagcaagagtgccatggagaggctgaagcgcggcatcattcacgctagaggactggttcgggagtgcttggcagaaacggaacggaatgccagatcctagctgccttgttggttttgaaggatttccatctttttacaagatgagaagttacagttcatctcccctgttcagatgaaacccttgttttcaaaatggttacagtttcgtttttcctcccatggttcacttggctctgaacctacagtctcaaagattgagaaaagattttgcagttaattaggatttgcattttaagtagttaggaactgcccaggttttttttgttttttaagcattgatttaaaagatgcacggaaagttatcttacagcaaactgtagtttgcctccaagacaccattgtctccctttaatcttctcttttgtatacatttgttacccatggtgttctttgttccttttcataagctaataccactgtagggattttgttttgaacgcatattgacagcacgctttacttagtagccggttcccatttgccatacaatgtaggttctgcttaatgtaacttcttttttgcttaagcatttgcatgactattagtgcttcaaagtcaatttttaaaaatgcacaagttataaatacagaagaaagagcaacccaccaaacctaacaaggacccccgaacactttcatactaagactgtaagtagatctcagttctgcgtttattgtaagttgataaaaacatctggaagaaaatgactaaaactgtttgcatctttgtatgtatttattacttgatgtaataaagcttattttcattaacaatttgt

SEQ ID NO: 200 - DNA, 1856 bp, Homo sapiens
  ref <308>: DATABASE ACCESSION NUMBER: AF062495
  ref <309>: DATABASE ENTRY DATE: 2001-06-18
cccggccgccgtggctatgttcgtgtccgatttccgcaaagagttctacgaggtggtccagagccagagggtccttctcttcgtggcctcggacgtggatgctctgtgtgcgtgcaagatccttcaggccttgttccagtgtgaccacgtgcaatatacgctggttccagtttctgggtggcaagaacttgaaactgcatttcttgagcataaagaacagtttcattattttattctcataaactgtggagctaatgtagacctattggatattcttcaacctgatgaagacactatattctttgtgtgtgacacccataggccagtcaatgtcgtcaatgtatacaacgatacccagatcaaattactcattaaacaagatgatgaccttgaagttcccgcctatgaagacatcttcagggatgaagaggaggatgaagagcattcaggaaatgacagtgatgggtcagagccttctgagaagcgcacacggttagaagaggagatagtggagcaaaccatgcggaggaggcagcggcgagagtgggaggcccggagaagagacatcctctttgactacgagcagtatgaatatcatgggacatcgtcagccatggtgatgtttgagctggcttggatgctgtccaaggacttgaatgacatgctgtggtgggccatcgttggactaacagaccagtgggtgcaagacaagatcactcaaatgaaatacgtgactgatgttggtgtcctgcagcgccacgtttcccgccacaaccaccggaacgaggatgaggagaacacactctccgtggactgcacacggatctcctttgagtatgacctccgcctggtgctctaccagcactggtccctccatgacagcctgtgcaacaccagctataccgcagccaggttcaagctgtggtctgtgcatggacagaagcggctccaggagttccttgcagacatgggtcttcccctgaagcaggtgaagcagaagttccaggccatggacatctccttgaaggagaatttgcgggaaatgattgaacagtctgcaaataaatttgggatgaaggacatgcgcgtgcagactttcagcattcattttgggttcaagcacaagtttctggccagcgacgtggtctttgccaccatgtctttgatggagagccccgagaaggatggctcagggacagatcacttcatccaggctctggacagcctctccaggagtaacctggacaagctgtaccatggcctggaactcgccaagaagcagctgcgagccacccagcagaccattgccagctgcctttgcaccaacctcgtcatctcccaggggcctttcctgtactgctctctcatggagggcactccagatgtcatgctgttctctaggccggcatccctaagcctgctcagcaaacacctgctcaagtcctttgtgtgttcgacaaagaaccggcgctgcaaactgctgcccctggtgatggctgcccccctgagcatggagcatggcacagtgaccgtggtgggcatccccccagagaccgacagctcggacaggaagaacttttttgggagggcgtttgagaaggcagcggaaagcaccagctcccggatgctgcacaaccattttgacctctcagtaattgagctgaaagctgaggatcggagcaagtttctggacgcacttatttccctcctgtcctaggaatttgattcttccagaatgaccttcttatttatgtaactggctttcatttagattgtaagttatggacatgatttgagatgtagaagccattttttattaaataaaatgcttattttaggctccgtcaaaaaaaaaa

SEQ ID NO: 201 - DNA, 1455 bp, Homo sapiens
  Modified_base 1 ... 1455: n = a,c,g, or t
  ref <308>: DATABASE ACCESSION NUMBER: U25770
  ref <309>: DATABASE ENTRY DATE: 2001-06-18
cgtaagtcctcaaagagccattctgttcccatcctccccacttccccagtcttaggttggttkgatttttttcctccttgtaagatgtggtgagagtggaaagtaattcctccctggccttaagtcacctctgtgtactcaatcctgctgactggctcactggmatgatggmagcggytggtgctagggaggcctgggytggattgagccagcctggccctggtgactaagccatgagttttccagctctgggaatggtagctcttctcacgagaggggsaagaagtagtagctgtttgtgcttggtggcagagaggacttgctggacatacaccctccagactccaagatagaagggggaagacataagcccccagtattkgtgggtgattggtaaagaataaaatgtaatattacaagggttggagtsccnggagganngnaangnngraaaaaaatymarraracnawwggamssssakngagrggcaraaaaarrrarmattnaagaaaaatnannawaggggwrctgaattrktarasktaatttsttagaggaacmaggtktttcnaatctwaccnaggctggtngcggacntcytgccntcaaattgaaycttmctnscctaagcctgcccaagtrctgttgattaaaagsattgaamcnactgtccccagcarykgkkggtatttttkaatggaccaagaacccaagawtgaarrwyctacaagagscttcctggaggtggtgggactkrrgtcatctggtttggcaggatggaaggccagctttcccagggtggaaccatcagagtggagsccccgcccagaacccaacagcagcaccatgcgcacccatagaaggggtagcctggagggaggccaggcgtgcgcagaaggcagctggacatgtggctacacctcaggttctttcatagacaagttactgacacattgctggctccaggggaaaacgcaaaacgaggaaaaggcccctctccctgctctcagggatgctgtagtcttttgactctcgrctgttgccagagcttcccccggragctcctgggaccarcatkcctcccactcaagccagtcagccagcatctttsctcctgggacagsctttggcccatgggagccaggcagagcccccaagactancccaaggcccgggctggtcccacctcccgctcctgctatgnatatgtgtttggggcagaggggagcagattactttaacacacttcagaattaaaatcagttcgtttcatgactctgtgccttaacgtttgtgtgaactaaacttgctgattgaatgaaattcttgggaagccgaacagtaatagcagaaaatgtgaccaaatgagtatcatgtacttaaatcactgaattttatataagcacaagtattaattttaaaaacattatagtttaataaagctgcatttaaag

SEQ ID NO: 202 - DNA, 830 bp, Homo sapiens
  ref <308>: DATABASE ACCESSION NUMBER: AA829653
  ref <309>: DATABASE ENTRY DATE: 2001-06-18
tagagaaaattggagaaggtacctatggagttgtgtataagggtagacacaaaactacaggtcaagtggtagccatgaaaaaaaatcagactagaaagtgaagaggaaggggttcctagtactgcaattcgggaaatttctctattaaaggaacttggtcatccaaatatagtcagtcttcaggatgtgcttatgcaggattccaggttatatctcatctttgagtttctttccatggatctgaagaaatacttggattctatccctcctggtcagtacatggattcttcacttgttaagagttatttataccaaatcctacaggggattgtgttttgtcactctagaagagttcttcacagagacttaaaacctcaaaatctcttgattgatgacaaaggaacaattaaactggctgattttggccttgcagagcttttggaatacctatcagagtatatacacatgaggtagtaacactctggtacagatctccagaagtattgctggggtcagctcgttactcaactccagttgacatttggagtataggcaccatatttgctgaactagccactaagaaaccacctttcccatggggattccgaaattgatcaacccttcaggattttccgaggctttgggcactccaataattgaagtgtggcccagagtgggaatctttacgggaccataggaataaattccccaaatgggaagccaggaagcctagcatcccatgtccaaaactttggaggagaatggcctggatttgctctccgaaagtgttatgcaaggtaaccgccacaacgaaattcccggcagaatgg

SEQ ID NO: 203 - DNA, 5749 bp, Homo sapiens
  ref <308>: DATABASE ACCESSION NUMBER: D42055
  ref <309>: DATABASE ENTRY DATE: 2001-06-18
ctcccgcttctcctcctcctcctccacagttgcctgccctgggcgggggcgagcgcgtccggtttgctggaagcgttcggaaatggcaacttgcgcggtggaggtgttcgggctcctggaggacgaggaaaattcacgaattgtgagagtaagagttatagccggaataggccttgccaagaaggatatattgggagctagtgatccttacgtgagagtgacgttatatgacccaatgaatggagttcttacaagtgtgcaaacaaaaaccattaaaaagagtttgaatccaaagtggaatgaagaaatattattcagagttcatcctcagcagcaccggcttctttttgaagtgtttgacgaaaaccgattgacaagagatgatttcctaggtcaagtggatgttccactttatccattaccgacagaaaatccaagattggagagaccatatacatttaaggattttgttcttcatccaagaagtcacaaatcaagagttaaaggttatctgagactaaaaatgacttatttacctaaaaccagtggctcagaagatgataatgcagaacaggctgaggaattagagcctggctgggttgttttggaccaaccagatgctgcttgccatttgcagcaacaacaagaaccttctcctctacctccagggtgggaagagaggcaggatatccttggaaggacctattatgtaaaccatgaatctagaagaacacagtggaaaagaccaacccctcaggacaacctaacagatgctgagaatggcaacattcaactgcaagcacaacgtgcatttaccaccaggcggcagatatccgaggaaacagaaagtgttgacaaccaagagtcttccgagaactgggaaattataagagaagatgaagccaccatgtatagcagccaggccttcccatcacctccaccgtcaagtaacttggatgttccaactcatcttgcagaagaattgaatgccagactcaccatttttggaaattcagccgtgagccagccagcatcgagctcaaatcattccagcagaagaggcagcttacaagcctatacttttgaggaacaacctacacttcctgtgcttttgcctacttcatctggattaccaccaggttgggaagaaaaacaagatgaaagaggaagatcatattatgtagatcacaattccagaacgactacttggacaaagcccactgtacaggccacagtggagaccagtcagctgacctcaagccagagttctgcaggccctcaatcacaagcctccaccagtgattcaggccagcaggtgacccagccatctgaaattgagcaaggattccttcctaaaggctgggaagtccggcatgcaccaaatgggaggcctttctttattgaccacaacactaaaaccaccacctgggaagatccaagattgaaaattccagcccatctgagaggaaagacatcacttgatacttccaatgatctagggcctttacctccaggatgggaagagagaactcacacagatggaagaatcttctacataaatcacaatataaaaagaacacaatgggaagatcctcggttggagaatgtagcaataactggaccagcagtgccctactccagggattacaaaagaaagtatgagttcttccgaagaaagttgaagaagcagaatgacattccaaacaaatttgaaatgaaacttcgccgagcaactgttcttgaagactcttaccggagaattatgggtgtcaagagagcagacttcctgaaggctcgactgtggattgagtttgatggtgaaaagggattggattatggaggagttgccagagaatggttcttcctgatctcaaaggaaatgtttaacccttattatgggttgtttgaatattctgctacggacaattataccctacagataaatccaaactctggattgtgtaacgaagatcacctctcttacttcaagtttattggtcgggtagctggaatggcagtttatcatggcaaactgttggatggttttttcatccgcccattttacaagatgatgcttcacaaaccaataacccttcatgatatggaatctgtggatagtgaatattacaattccctaagatggattcttgaaaatgacccaacagaattggacctcaggtttatcatagatgaagaactttttggacagacacatcaacatgagctgaaaaatggtggatcagaaatagttgtcaccaataagaacaaaaaggaatatatttatcttgtaatacaatggcgatttgtaaaccgaatccagaagcaaatggctgcttttaaagagggattctttgaactaataccacaggatctcatcaaaatttttgatgaaaatgaactagagcttcttatgtgtggactgggagatgttgatgtgaatgactggagggaacatacaaagtataaaaatggctacagtgcaaatcatcaggttatacagtggttttggaaggctgttttaatgatggattcagaaaaaagaataagattacttcagtttgtcactggcacatctcgggtgcctatgaatggatttgctgaactatacggttcaaatggaccacagtcatttacagttgaacagtggggtacgcctgaaaagctgccaagagctcatacctgttttaatcgcctggacttgccaccttatgaatcatttgaagaattatgggataaacttcagatggcaattgaaaacacccagggctttgatggagttgattagattacaaataacaatctgtagtgtttttactgccatagttttataaccaaaatcttgacttaaaattttccggggaactactaaaatgtggccactgagtcttcccagatcttgaagaaaatcatataaaaagcatttgaagaaatagtacgacaacttatttttaatcacttttaaataatgtgttgcatttacacagttgtttcatgctgtctttagagttaggtgcctgcctaaagccaggcaccaccacacctggctttagagttcacacaataggatataagtcctgtatgacttaaatagtgaattttatccttaacatttacctcttgtatagtatctgccaggcagttttttcttaaactactgagatgataactgtgaaatatttgtgatacgtgtcatgtgtgaaaagtttgatgcattttgagatggaaaactgaaatttggaaaaagaaatactttactattgagtaaactacaatatatttagtgctactcgcagctatttattattttgtagacctgccttatgcaccttactgcctagatttttgggaaaaaactttggaaagtgtgttacctatatttctagccaactaactcacagaaaaactgtttacttcttcactttcgaagtatttggcttttgttaatatgcagttttactaaacagatggttcataagacatgtgaagcaaattcatatttgcaatgggtaaaaagtattaaagcctttctcttgcctgcatatcctattgaccattggtatagtcatcactttttcatattttagtgtagttagaagaattccttcttcaaacattaaagatccacaaagcagtatttctaaatatgccttgaagaactaaatgaagtgtatagcacttgcctttactagatattctttacacttgtacaattatgtagtaaatgtatgtttacagggtttatcatgtttacagattaagctaatttctgtagtcgcatttttatatttttagtatcactctagtaaaaaaaccaaataatttgtttaaaataaccaaagagttgttataatgcataatttgtattaaatttattactatttcttatgccttttaaaatactgtttactatgaagacaatgtttttaattacaaatccagaattctgtaggcaaaatgctacagttcatatcttcctttaaccaaactgaagtacataaagaccatgtacatgtattcatcaaacgtttattgaatgctgcgtgcctagcgctgtgctatgctctggggtaagagttgtcagcttcagagaagctgagtcctgatcctcaaggaacttgcaaatgtgtctatgaatttgtaaaacaatcaaaagtaggcgtaagcagaataaggcaaaagggaaagtgttctaggttccagcacacctgcaaagataaagtgtgccaagactgtatttatatttcatacttatattgtttcatccttatattggaatgattatatagaaaatgctcttaaaaagattaaacctatttctcagtatggtatcttggtgatttaggaataattgtaaatatatgttacgaatcttcttaaatatatatatatacacaccctgtgagaactgtaaaaagtacctctggttcttggtttaagtttgttggggtataacatgatgagtactcattagcacctgatagaaatctgaaatgtgacagtagcaaaaccactttctactttccaaacaccacagcatcagcatggtttaggggaagcaattcacagattaatgtaccctgcgttttgtcttcaccattgtcaaccagcagtcaaggatgagcaccaggtatagtcctggtttgatatctcaccagccatgtgaactgaagcagcttacttaacctctctggattcatatttcttcatctgtcaaatgagagtaatcatgcccaccctcattgtcatggcagattgtcagaagttccagacagatgagaaagcaaaaagtactttgtaaagtgttatacaatcagaaggtgctttgtgctgaccgtcagattgtgtcaagtcaggtgtgcaaattgaccacactcccaaagaatcatttaaaagtaaagtgacttctaagagacaaggaagtaggaacatttctgatattaaatatataaataatatggatacacatgtgtatatctgtatatggatcttaccatcataattcattttcttcatatcagcaaagtaatagtaatgtgggccaatgcattttggaaatgtcctcattatgtagaatggaatgtgaaaattatttttgttaaaacaggattttgccacaattatttaaatattatgtttgtgaactatctaagcatgagaaaatacaaagctttctttgtatctggctgatactcatttggatgattctgtgactcatagaacatgatgttaaatgagaccagactcaactgccaccagtccccagctgcagaccttcatccccttcatctcccactaggggctcgtggtctggaagaaacatgtatcaagcaacacagccccttatcccagatagaaaagtgtctcaaatgcattctactgcgggacagtcagtaggatcattttcataaagcaaggacatcatatgtttctagaaattacaagcatataactttagcctacaatctcttattaaaaatttttaacaaaattgtattacaaatgcatttcatcagaactcaaatttaaatggtgtttgttttgggtttttatttataatgctgaagttattccatataagtatcaagttaaacacaattcattttgattataaactatttgactttttaaaatcttctgacacagtaaatatatatatcaagattgatgtatcaaaatttattgcacactttaaagtgtaaaatcattttttaaaatcttgaatccacaaataaagttctattctgatttt

SEQ ID NO: 204 - DNA, 870 bp, Homo sapiens
  ref <308>: DATABASE ACCESSION NUMBER: M58459
  ref <309>: DATABASE ENTRY DATE: 2001-06-18
cagagtttcgccatggcccggggccccaagaagcacttaaagcgtgttgcagcgccgaagcattggatgcttgacaaactaacgggtgtatttgcacctcgtccatcgacaggtccccacaagctgagggaatgtcttcctctgatcgtcttcctcaggaatagactcaagtatgcgttgactggagatgaggtaaagaagatatgtatgcaacgtttcatcaaaattgatggcaaggttcgagtggatgtcacataccctgctggattcatggatgtcatcagcatcgagaagacaggtgaacatttccgcctggtctatgacaccaagggccgttttgctgttcaccgcatcacagtggaagaggcaaagtacaagttgtgcaaagtgaggaagattactgtgggagtgaagggaatccctcacctggtgactcatgatgctcgaaccatccgctacccagatcctgtcatcaaggtgaacgatactgtgcagattgatttagggactggcaagataatcaactttatcaaatttgatacaggcaatttgtgtatggtgattggtggagccaacctcggtcgtgttggtgtgatcaccaacagggaaagacatcctggttcttttgatgtggtgcatgtgaaggatgccaatggcaacagctttgccacgaggctttccaacatttttgtcattggcaatggcaataaaccttggatttccctgcccaggggaaagggcattcgacttactgttgctgaagagagagataagaggctggccaccaaacagagcagtggctaaattgcagtagcagcatatctttttttctttgcacaaataaacagtgaattctcgttaaaaaaaaaa

SEQ ID NO: 205 - DNA, 483 bp, Homo sapiens
  ref <308>: DATABASE ACCESSION NUMBER: AA878385
  ref <309>: DATABASE ENTRY DATE: 2001-06-18
tgttcttcattgcctgtgtttctttgtcacttttatctgtggtcttactctatttggtgaatcgtgcccagggtgggaactaaattattctgcaagacaaagggaagaaataaaattttcccatactgaatgagaagtgaaaatgaatgtgtcatgagaatgggcttaacacatcgttggtttgaaaacttccatttttaaaaatttagagtttagtcattagaaaaaataatggactggaaagttatatttatatccaaatatacctatttcaaagtgtatttgtgaggcctgttttagcctgtgtcttttgtattgtgtgttgctaaagaattctacttttagtaggctaatcaacaatgaaagggttagaaaattgctgtggaacatccaggtgaacttcaggaaagacagtgaaaaatggaaaacgttggagcttctgttgagataatcttcattaggtatatatcttagggatacagc

SEQ ID NO: 206 - DNA, 503 bp, Homo sapiens
  ref <308>: DATABASE ACCESSION NUMBER: AI191557
  ref <309>: DATABASE ENTRY DATE: 2001-06-18
ttttttttttgttgggtaacttggccatattaatttatttagcaaatacaacagattttgagtgtctgccacatgggtggtctccagggacagtgttgtggggagctcgcaggcagatctttaacctgggttcacaatctccagggcacctgtgcctgggcttccaggcgaccttcgaacccagatgtctcacatgtatgcagaggcgcacacaagcacacgcacatatacttatgactgcctgtttgtctggggagagacagttcctggtgcttaatcaaatcaggaactcaaaagaagttcggaagcactgctggtgttttgggtgctttcggttaccatttggtcacgtgtgtggagactttcttagacaagtagttcttagttaaccaccaatggaactgggttcattctgaatcctggaggagcttcctcgtgccacccagtgtttctgggccctctgtgtgagcagccaggtatgagctgttttagaagcagcgtgt

SEQ ID NO: 207 - DNA, 1518 bp, Homo sapiens
  ref <308>: DATABASE ACCESSION NUMBER: AB011004
  ref <309>: DATABASE ENTRY DATE: 2001-06-18
atgaacattaatgacctcaaactcacgttgtccaaagctgggcaagagcacctactacgtttctggaatgagcttgaagaagcccaacaggtagaactttatgcagagctccaggccatgaactttgaggagctgaacttctttttccaaaaggccattgaaggttttaaccagtcttctcaccaaaagaatgtggatgcacgaatggaacctgtgcctcgagaggtattaggcagtgctacaagggatcaagatcagctccaggcctgggaaagtgaaggacttttccagatttctcagaataaagtagcagttcttcttctagctggtgggcaggggacaagactcggcgttgcatatcctaaggggatgtatgatgttggtttgccatcccgtaagacactttttcagattcaagcagagcgtatcctgaagctacagcaggttgctgaaaaatattatggcaacaaatgcattattccatggtatataatgaccagtggcagaacaatggaatctacaaaggagttcttcaccaagcacaagtactttggtttaaaaaaagagaatgtaatcttttttcagcaaggaatgctccccgccatgagttttgatgggaaaattattttggaagagaagaacaaagtttctatggctccagatgggaatggtggtctttatcgggcacttgcagcccagaatattgtggaggatatggagcaaagaggcatttggagcattcatgtctattgtgttgacaacatattagtaaaagtggcagacccacggttcattggattttgcattcagaaaggagcagactgtggagcaaaggtggtagagaaaacgaaccctacagaaccagttggagtggtttgccgagtggatggagtttaccaggtggtagaatatagtgagatttccctggcaacagctcaaaaacgaagctcagacggacgactgctgttcaatgcggggaacattgccaaccatttcttcactgtaccatttctgagagatgttgtcaatgtttatgaacctcagttgcagcaccatgtggctcaaaagaagattccttatgtggatacccaaggacagttaattaagccagacaaacccaatggaataaagatggaaaaatttgtctttgacatcttccagtttgcaaagaagtttgtggtatatgaagtattgcgagaagatgagttttccccactaaagaatgctgatagtcagaatgggaaagacaaccctactactgcaaggcatgctttgatgtcccttcatcattgctgggtcctcaatgcagggggccatttcatagatgaaaatagctctcgccttccagcaattccccgcttgaaggatgccaatgatgtaccaatccaatgtgaaatctctcctcttatctcctatgctggagaaggattagaaagttatgtggcagataaagaattccatgcacctctaatcatcgatgagaatggagttcatgagctggtgaaaaatggtatttga

SEQ ID NO: 208 - DNA, 3004 bp, Homo sapiens
  ref <308>: DATABASE ACCESSION NUMBER: U92715
  ref <309>: DATABASE ENTRY DATE: 2001-06-18
ggaggtccagagatcctgagagcccgagcgcccagcgccgcgccgggagagttgagaattatggctgcaggaaaatttgcaagccttcccagaaacatgccggtgaatcaccagttccccctggcctcatccatggaccttctgagcagcaggtcccctctcgctgagcatcgcccagatgcctatcaagatgtgtctatacatggcacccttccacggaagaaaaaaggtcctcctcccataaggtcctgtgatgacttcagtcacatgggcaccctcccccactccaaatccccacggcagaactcgcctgtgacccaggatggcatccaggagagcccatggcaggaccggcacggcgaaaccttcaccttcagggatccacatcttctggacccaactgtggaatatgtgaagttctccaaggagaggcacatcatggacaggacccccgagaaactgaagaaggagctggaggaggagctgctcctgagcagcgaggacctgcgcagccatgcctggtaccacggccgcatcccccgacaggtgtctgaaaaccttgtgcagcgagatggtgacttcctagttcgtgactctctgtccagccctgggaactttgtcctgacctgtcagtggaagaacctcgctcagcacttcaaaatcaaccggacagttctgcgactcagcgaggcctacagccgcgtgcagtaccagttcgagatggagagcttcgactccatccccggcctggtgcgctgctacgtgggcaaccgccggcccatctcccagcagagtggcgccatcatcttccagcccatcaacaggacggtgcctctgcggtgcctggaggagcattatggcacctccccaggccaggcccgggagggcagcctcaccaagggaaggccggatgtggccaagaggctgagcctcaccatgggtggcgtccaggcccgagagcagaatttgcccaggggaaacctcctcagaaacaaagaaaagagtggtagccagcccgcctgcctggatcacatgcaggacagaagagccttgtccctcaaagcccaccagtcagagagctacctgccgattggctgcaagctgccacctcagtcctcgggtgtggacacaagcccctgcccaaactcacctgtgttcaggacgggaagcgagcctgccctgagcccagcagtggttcggagggtctcctcagacgccagggctggggaggcgctgaggggatcagacagtcaactgtgccctaagcccccgcctaagccctgcaaggtgccgttcctcaaggttccctcgtctccctctgcctggctcaactcagaggccaactactgtgaactgaacccagcgtttgccacaggctgcggcaggggagcaaagctaccctcatgtgcccagggaagccacacagaactgctcacagccaagcagaatgaggcgccaggtccccggaactctggcgtcaactacttgatccttgatgatgatgacagggaaagaccttgggaacctgcggcagctcagatggagaaggggcagtgggacaagggcgagtttgtgacgcccctcctggagactgtctcctccttcaggcccaacgagtttgagtcaaagttccttccccctgagaataagcccctggaaacagcaatgttgaaacgtgcaaaagaactgttcaccaacaacgaccccaaggtcatcgcccagcacgtactgagcatggactgcagggttgctaggatacttggagtctctgaagagatgaggaggaacatgggggtgagctcaggcctggaactcattaccttgcctcacggacaccagctgcgcctggacataattgaaagacacaacacaatggccatcggcattgcagtggacattctgggatgcacgggcactttggaggaccgagcggccactctgagtaagatcatccaggtggcggtggaactgaaggattccatgggggacctctattccttctcagctctcatgaaagccctggaaatgccacagatcacaaggttagaaaagacgtggactgctctgcggcaccagtacacccaaactgccattctctatgagaaacagctgaagcccttcagcaaactcctgcatgaaggcagagagtccacatgtgttcccccaaacaatgtatcagtcccactgctgatgccgcttgtgacgttaatggagcgccaggctgtgacttttgaaggaaccgacatgtgggaaaaaaacgaccagagctgtgaaatcatgctgaaccatttggcaacagcgcgattcatggccgaggctgcagacagctaccggatgaatgctgagaggatcctggcaggttttcaaccagatgaagaaatgaatgaaatctgcaagactgaatttcaaatgcgattgctatggggcagcaaaggtgcacaagtcaatcagacagagagatatgagaaattcaaccagattttaactgccctctcgcgtaaattggaacctcctcctgtaaagcaggcagagctttgataactctccagagaacctttagaatatcttttcaagtttccccagcttcatctttgggaaagcttactgtttttgataaagtaataatgtgcaaatctgacaatatacaagcttttagtatccacaggatattaaacgtgtaaattgcacagagcacacttatttatgaattgtctaaagttactactgattttaaaatgaataatttattattaaggtaactactgctaatgttgatcagcaaatttaagagaagacctagctatgttggctggttgctttctattatcatggtatttgaccattttagttttaattccatgtcagataagtgtaaatagaagagtttaaaagcatgaaacatttcagaaggtatcagttatatgatattctttaaacaaatatgaaaaatgtaaatactcatgaatgaaaatacatctttttgtgaaaaaaaaaaaaaaaaaaa

SEQ ID NO: 209 - DNA, 1792 bp, Homo sapiens
  ref <308>: DATABASE ACCESSION NUMBER: L10373
  ref <309>: DATABASE ENTRY DATE: 2001-06-18
gaattccatatcatggcctgccgccgccgccgccgccgccggagctctgtagtatggcatcgaggagaatggagaccaaacctgtgataacctgtctcaaaaccctcctcatcatctactccttcgtcttctggatcactggggtgatcctgctggctgttggagtctggggcaaacttactctgggcacctatatctcccttattgccgagaactccacaaatgctccctatgtgctcatcggaactggcaccactattgttgtctttggcctgtttggatgctttgctacatgtcgtggtagcccatggatgctgaaactgtatgccatgtttctgtccctggtgttcctggctgagctcgtagctggcatttcagggtttgtgtttcgtcatgagatcaaggacaccttcctgaggacttacacggacgctatgcagacttacaatggcaatgatgagaggagccgggcagtggaccatgtgcagcgcagcctgagctgctgtggtgtgcagaactacaccaactggagcaccagcccctacttcctggagcatggcatcccccccagctgctgcatgaacgaaactgattgtaatccccaggatctacacaatctgactgtggccgccaccaaagttaaccagaagggttgttatgatctggtaactagtttcatggagactaacatgggaatcatcgctggagtggcgtttggaatcgcattctcccagttaattggcatgctgctggcctgctgtctgtcccggttcatcacggccaatcagtatgagatggtgtaaggagaagtctttcaagaatgacggaataagagacctgttttaaaaaggaactgcagcaatctttgaaagacttccaaagaatgttagagcacagtacataatacacttgccctgctccctctaccccttaccccacaacgtgcaactgacactcccacccagtctctgctccacctttcagcccacgtcacgtgtagtgtccattttgtgaagccctgttgtgccacagagtgtagccaggtccccctgcagctagtcctagtgaacctcaccccgaggccctgcatgggccagcccctccatctgtacttggtccaactgcaactcatcatcggtgactggttatcacaccatcgctggcccctttgggccctgcatgtagtgtgggaggctcctgttagctcctcactgtggtaaatgccacacacctttaagtagataagcagacgatagttatctgttcttttgacttaatctcatttggtttgattttccctctactaaggctttcctaccttcttcaggctgcctaagacatgtaacgaaacacttcaataattgtccatgaggagaaaaaaagcatgtgtcatgcatgaaggaaactgaacttgaggtggcctccttgcttgttacatacctgggtatgtgtaggcagtttagtgcatctttgcctctcagttgaaacctgtataaccctgttacaaagctgtgttgttgcttcttgtgaaggccatgatattttgtttttccccaattaattgctattgtgttattttactacttctctctgtattttttcttgcattgacattatagacattgaggacctcatccaaacaatttaaaaatgagtgtgaagggggaacaagtcaaaatatttttaaaagatcttcaaaaataatgcctctgtctagcatgccaacaagaatgcattgatattgtgaacatttgtgatatatgtattaataaatagagcaattacggaattc

SEQ ID NO: 210 - DNA, 1070 bp, Homo sapiens
  ref <308>: DATABASE ACCESSION NUMBER: X92814
  ref <309>: DATABASE ENTRY DATE: 2001-06-18
gcgattgctggggctgcagcgctgcctccgagaccgagagtgggtggagcgggtcttcctggaagggtgcgataaggccgggcgaggtgcctgggatgcttctccccttccgcgaggaagagatctaattgggtagggcgggtgtagactagcctgccgagccgcccgctggcacctgcagcctcctgggcgcccgcgggcccggcgagaaagttgttaaagggagcgaggtggttgttcctggggtccgaggcgcgcctctcacgccctgcccaacagaagccgcagtcccgtggggtctggagacgcagtttccttgttaatgacaataaatccctgctccccctgcctcagacatctacgcagcgaaatcgagcctggccttgagggtccacaccgcgaggaagatgcgtgcgcccattccagagcctaagcctggagacctgattgagatttttcgccctttctacagacactgggccatctatgttggcgatggatatgtggttcatctggcccctccaagtgaggtcgcaggagctggtgcagccagtgtcatgtccgccctgactgacaaggccatcgtgaagaaggaattgctgtatgatgtggccgggagtgacaagtaccaggtcaacaacaaacatgatgacaagtactcgccgctgccctgcacgaaaatcatccagcgggcggaggagctggtggggcaggaggtgctctacaagctgaccagtgagaactgcgagcactttgtgaatgagctgcgctatggagtcgcccgcagtgaccaggtcagagatgtcatcatcgctgcaagcgttgcaggaatgggcttggcagccatgagccttattggagtcatgttctcaagaaacaagcgacaaaagcaataactgaaaaagactgtctgtcagcgatgactttatacatcaagggggtcttgttttgctagagagtttggggtttggtttgtggatttcattgtgatttataataaggcttattttcacagaataaaataaagcaaaacgagggaggattttattgggggagtgcagcccaaaaaa

SEQ ID NO: 211 - DNA, 471 bp, Homo sapiens
  Modified_base 1 ... 471: n = a,c,g, or t
  ref <308>: DATABASE ACCESSION NUMBER: N39247
  ref <309>: DATABASE ENTRY DATE: 2001-06-18
tgcaaagtaactgtgttttttatttctatgaacaataaaatactttcataatttcacatcccattgcttttaagagcacatatattacaaataaaggaactccacaaactttaaagattagtatttatcaacgcttttgtacacatacacaaatattttaatataatggtatctgaaatgttattcatatatttttagtactgtcatagtattaactaaaaaggatcttttaaatttggtaaaaaccgtatattttacaatcttttatttacatctgaaatatgcttaaatgttacaaaaacattcactttaacctttaaaatatgtgtactaggactggggtactgaccatacnataactggacagcaaacttagggnttgccatttggagctacaccttcnctgggatttcntgggccaatattccacctgggcctggatcaacacnggctccaaggaaaaaaaaattg

SEQ ID NO: 212 - DNA, 2889 bp, Homo sapiens
  ref <308>: DATABASE ACCESSION NUMBER: AF039022
  ref <309>: DATABASE ENTRY DATE: 2001-06-18
atggatgaacaggctctattagggctaaatccaaatgctgattcagactttagacaaagggccctggcctattttgagcagttaaaaatttccccagatgcctggcaggtgtgtgcagaagctctagcccagaggacatacagtgatgatcatgtgaagtttttctgctttcaagtactggaacatcaagttaaatacaaatactcagaactaaccactgttcaacaacagctaattagggagacgctcatatcatggctgcaagctcagatgctgaatccccaaccagagaagacctttatacgaaataaagccgcccaagtcttcgccttgctttttgttacagagtatctcactaagtggcccaagtttttttttgacattctctcagtagtggacctaaatccaaggggagtagatctctacctgcgaatcctcatggctattgattcagagttggtggatcgtgatgtggtgcatacatcagaggaggctcgtaggaatactctcataaaagataccatgagggaacagtgcattccaaatctggtggaatcatggtaccaaatattacaaaattatcagtttactaattctgaagtgacgtgtcagtgccttgaagtagttggggcttatgtctcttggatagacttatcccttatagccaatgataggtttataaatatgctgctaggtcatatgtcaatagaagttctacgggaagaagcatgtgactgtttatttgaagttgtaaataaaggaatggaccctgttgataaaatgaaactagtggaatctttgtgtcaagtattacagtctgctgggtttttcagcattgaccaggaagaagatgttgacttcctggccagattttctaagttggtaaatggaatgggacagtcattgatagttagttggagtaaattaattaagaatggggatattaagaatgctcaagaggcactacaagctattgaaacaaaagtggcactgatgttgcagctactaattcatgaggatgatgatatttcttctaatattattggattttgttacgattatcttcatattttgaaacggcttacagtgctctcggatcagcaaaaagctaatgtagaggcaatcatgttggccgttatgaaaaaattgacttacgatgaagaatataactttgaaaatgagggtgaagatgaagccatgtttgtagaatatagaaaacaactgaagttactgttggacaggcttgctcaagtttcaccagagttactactggcctctgttcgcagagtttttagttctacactgcagaattggcagactacacggtttatggaagttgaagtagcaataagattgctgtatatgttggcagaagctcttccagtatctcatggtgctcacttctcaggtgatgtttcaaaagctagtgctttgcaggatatgatgcgaactctggtaacatcaggagtcagttcctatcagcatacatctgtgacattggagttcttcgaaactgttgttagatatgaaaagtttttcacagttgaacctcagcacattccatgtgtactaatggctttcttagatcacagaggtctgcggcattccagtgcaaaagttcggagcaggacggcttacctgttttctagatttgtcaaatctctcaataagcaaatgaatcctttcattgaggatattttgaatagaatacaagatttattagagctttctccacctgagaatggccaccagtccttactgagcagcgatgatcaactttttatttatgagacagctggagtgctgattgttaatagtgaatatccggcagaaaggaaacaagccttaatgaggaatctgttgactccactaatggagaagtttaaaattctgttagaaaagttgatgctggcacaagatgaagaaaggcaagcctccctagcagactgtcttaaccatgctgttggatttgcaagtcgaaccagtaaagctttcagcaacaaacagactgtgaaacaatgtggctgttccgaagtttatctggactgtttacagacattcttgccagccctcagttgtcccttacaaaaggatattctcagaagtggagtccgtactttccttcatcgaatgattatttgcctggaggaagaagttcttccgttcattccatctgcttcagaacatatgctcaaagattgtgaagcaaaagatctccaggagttcattcctcttatcaaccagattacggccaaattcaagatacaggtatccccgtttttacaacagatgttcatgcccctgcttcatgcaatttttgaagtgctgctccggccagcagaagaaaatgaccagtctgctgctttagagaagcagatgttgcggaggagttactttgctttcctgcaaacagtcacaggcagtgggatgagcgaagttatagcaaatcaaggtgcagagaatgtagaaagagtgttggttactgttatccaaggagcagttgaatatccagatccaattgcacagaaaacatgttttatcatcctctcaaagttggtagaactctggggaggtaaagatggaccagtgggatttgctgattttgtttataagcacattgtccccgcatgtttcctagcacctttaaaacaaacctttgacctggcagatgcacaaacagtattggctttatctgagtgtgcagtgacactgaaaacaattcatctcaaacggggcccagaatgtgttcagtatcttcaacaagaatacctgccctccttgcaagtagctccagaaataattcaggagttttgtcaagcgcttcagcagcctgatgctaaagtttttaaaaattacttaaaggtgttcttccagagagcaaagccctga

SEQ ID NO: 213 - DNA, 4241 bp, Homo sapiens
  ref <308>: DATABASE ACCESSION NUMBER: AB020662
  ref <309>: DATABASE ENTRY DATE: 2001-06-18
agaaaatgttgccagttgatggggaagaaaggaagtcggagggctcagacactgagggggacagaacatctccatgtgcagtctcatctgctaccctgaaggatctggaggtaggaggctctgggcggaggtgcagtgaccccgcaggccagccctccaacctcctcccgcagcggggactgggtgcccctctgccagctgagacagcccacacacaacccagccctaatgatcgttctctctacctctcccccaagtcctcctccgcctcctcctctctgcatgcgcgtcagagcccgtgccaagaacaagcagcagtcctgaactcgaggtccataaaaatcagtcgactgaatgacaccatcaaatctttgaaacaacagaagaaacaagtggaacatcagctggaagaagaaaagaaagcaaacaatgagaaacagaaagctgaaagggagctagagggtcaaatccagagattgaacacagagaaaaagaaactaaatacggacctgtatcacatgaaacattctctcagatactttgaagaagagtccaaggatctggccggccgcctgcaacgttcatcgcagcgtataggagagttagagtggtctctctgtgctgtcgccgccacacagaagaagaagccggatgggttctcgagccgcagtaaagcacttctcaagcggcagttagagcagtccatacgggagcagatactgctgaaaggacacgtgacacagttgaaggagtcgcttaaagaagtccagctggagagagatcaatatgctgaacaaataaaaggagagagggcccagtggcagcagaggatgaggaaaatgtcgcaggaggtttgcacattgaaggaggagaagaagcatgatacgcatcgggtagaggagctggagaggagcttgtccagactcaaaaaccagatggctgagccactgcccccggatgccccagcagtgtcctctgaggtggagctgcaagacctgaggaaggagctggagagagtggcaggagagctccaggctcaggtggaaaacaatcagtgcatcagtctcctgaaccgtgggcaaaaggagaggcttcgcgagcaggaggagaggcttcaggagcagcaggagaggcttcgggaacgggagaagaggcttcagcagctggccgagccacagagcgacttggaggagctgaagcacgagaacaagagcgcactgcagttggagcagcaagtaaaggagctgcaggagaagctgggccaggtgatggagacgctcacctcggccgagaaggagccagaggcagcagtcccagcctcagggactgggggcgagtctagcggccttatggacctcctggaggagaaggcggacctgagggagcatgtggagaaactggaacttggattcatccagtaccggagagagagatgccatcagaacgtacatcgccttctaacagagccaggggacagtgccaaagatgcgtcaccgggaggaggccatcatcaggctggcccaggacaaggaggagaggaaggtgaagctgctggagctgcaggagatggtgttgcggcttgtggcagctacaacgaggggcacggcaaattcctggccgctgcccagaaccctgctgctgaacccagtccaggagccccagccccccaggagctcggggctgccgacaagcatggtgatctttgtgaggcgagcctcaccaacagcgtggagcctgcacaaggagaagccagggagggttcttcccaggacaaccctactgcacagccaatcgtgcagctccttggtgagatgcaggaccaccaggagcacccaggcttgggcagcaactgctgtgtgccatgcttttgctgggcttggctgccgagaagaaggagataaacaccaccatcatcaaagagctgctcaagaaatttttaaaaacgaaacaaagttatggggttaatctcctacacaattcatttacttcatttgaatgttagagctactcatgattatttgtgtttctaatttatagtttaagtttatttgtaaaaagttaaaagagagtgggtctctgtggctctcactgatgttcactctggcatccttcagcatttttcttttttcatttcataattgtaggtcattagcatgcatatcgagtttgcccttacgtggtgggagttcaaacacacaaagacccactctttgcacaaaactgttctcgctggtttggaataggctcccgtgcttttctaatgttattgcagcatggatgtccattacagaattcagataaaatttgctaatgttctgctatgatgtttgatctcatcttaatcacagtgagctcttctatagctcaatatgcggtttgccctcaagtgtgcactgtttattactttgtaatatgccactgtgagtactgacatttagagctgtttaaaggccgagaactggaaacagcctttcctccattttctgtgtattggtgatgggagtgataaccttttgggggagctttctaaatctcacagaagaggaaagtggcctgctctggcaggtatgtgcaggatacagtgtgtttcatctgttccggtgccaagaatgagcagtgtactgtggcagttccctttggatttgtatgtgctctgggctcatgaagatattgcatcgtgagctgcagcagttgcactctttttcaatgacctaaaaagggcttatttccgaggaatgaaaggctgccatcattggctgtgggtgtgaaaaacctttcctagcttagagcatttgtatctacaatacattttaaagtcagagttcgtgttccctgttttaatcacatgactacctgtcccagtacacgaaagggcgctggttggcattcttcttaatgtatttagtgaagatcataagaaatcctttaagagtttaaatgtctctgaaacaggcatacaggctctagtcaagaatgaattagagtgaaggaaagctgtgtgacacctggcattcctctctgttcatggagcttctttgaggcttgaagtttgattttactatctagacctctctggctaatacctattcttcaaccacctcggttactctgacataggaatttacttcttttccttgagtggaaaacactttagaaagtaataacaaacattattataaactaatatatgtgagagtacttagttgaaacaaaaaggaattttagtagacagtattatattatctttgaaaatcaaggagaagtttatgcaacttaaaatgtttacacactgtggtgcaatctactgtttgtgaatgtctgtattatcaggaaacatgtctatacgatcgcagagttgtatttcctcacaaacttctttacgaagagtgaaatacgtttttgtacctctcattttcagtcagggacatactttgtgcaatatttctgtgattgtgcctatgcatgatgaatgaatgcatttcaatcatacattgcctaaatcataacttgatgatgcttgggaaagaatcaacagttaaaacttcatgaagttctaatgtctgtgttccaaaacacatcacattattaggttgtagggagatatgtaggtgtgctccctggggtggggagttttctagttactagaccatctccatttttagcacttggcagcctcatgatccttttataaatgtgagattaacaggagagcagcaatacgattttgccaatggaataacagatttgccggcattcactgaaagagggcagatattgggtccttgtaacttcaactgactcttccaaattgtatgaatttatcaatgtattacacaaatccagtttcagaatgataaaaaatgttagaccaaataatgcggctaattaacagtcgtatgatttctagcccatgggtttaaaactgtatcttaaagagtcattttaaaataatataaatattaaaaaatgtaactgctatcttaatgttctgaaataaaacattttaaaatataaatcctgtagtttaaaaggaagaaatggtgggaaggaaaagtagagaaagaaatgccaattacaggccaaagcgttatttgccaagttttcttagaatgaattttaccaatgtatgagttcttgttaacagaatgtgtaacggaaatactgaaagacttttgcttaaagtggcattattgactgctgatgtgatgctactgtaatgcaataaatttttaaattgttgc

SEQ ID NO: 214 - DNA, 3410 bp, Homo sapiens
  ref <308>: DATABASE ACCESSION NUMBER: AF009615
  ref <309>: DATABASE ENTRY DATE: 2001-06-18
gaattcgaggatccgggtaccatgggcggcggcaggcctagcagcacgggaaccgtcccccgcgcgcatgcgcgcgcccctgaagcgcctgggggacgggtatgggcgggaggtaggggcgcggctccgcgtgccagttgggtgcccgcgcgtcacgtggtgaggaaggaggcggaggtctgagtttcgagggagggggggagagaagagggaacgagcaagggaaggaaagcggggaaaggaggaaggaaacgaacgagggggagggaggtccctgttttggaggagctaggagcgttgccggcccctgaagtggagcgagagggaggtgcttcgccgtttctcctgccaggggaggtcccggcttcccgtggaggctccggaccaagccccttcagcttctccctccggatcgatgtgctgctgttaacccgtgaggaggcggcggcggcggcagcggcagcggaagatggtgttgctgagagtgttaattctgctcctctcctgggcggcggggatgggaggtcagtatgggaatcctttaaataaatatatcagacattatgaaggattatcttacaatgtggattcattacaccaaaaacaccagcgtgccaaaagagcagtctcacatgaagaccaatttttacgtctagatttccatgcccatggaagacatttcaacctacgaatgaagagggacacttcccttttcagtgatgaatttaaagtagaaacatcaaataaagtacttgattatgatacctctcatatttacactggacatatttatggtgaagaaggaagttttagccatgggtctgttattgatggaagatttgaaggattcatccagactcgtggtggcacattttatgttgagccagcagagagatatattaaagaccgaactctgccatttcactctgtcatttatcatgaagatgatattaactatccccataaatacggtcctcaggggggctgtgcagatcattcagtatttgaaagaatgaggaaataccagatgactggtgtagaggaagtaacacagatacctcaagaagaacatgctgctaatggtccagaacttctgaggaaaaaacgtacaacttcagctgaaaaaaatacttgtcagctttatattcagactgatcatttgttctttaaatattacggaacacgagaagctgtgattgcccagatatccagtcatgttaaagcgattgatacaatttaccagaccacagacttctccggaatccgtaacatcagtttcatggtgaaacgcataagaatcaatacaactgctgatgagaaggaccctacaaatcctttccgtttcccaaatattggtgtggagaagtttctggaattgaattctgagcagaatcatgatgactactgtttggcctatgtcttcacagaccgagattttgatgatggcgtacttggtctggcttgggttggagcaccttcaggaagctctggaggaatatgtgaaaaaagtaaactctattcagatggtaagaagaagtccttaaacactggaattattactgttcagaactatgggtctcatgtacctcccaaagtctctcacattacttttgctcacgaagttggacataactttggatccccacatgattctggaacagagtgcacaccaggagaatctaagaatttgggtcaaaaagaaaatggcaattacatcatgtatgcaagagcaacatctggggacaaacttaacaacaataaattctcactctgtagtattagaaatataagccaagttcttgagaagaagagaaacaactgttttgttgaatctggccaacctatttgtggaaatggaatggtagaacaaggtgaagaatgtgattgtggctatagtgaccagtgtaaagatgaatgctgcttcgatgcaaatcaaccagagggaagaaaatgcaaactgaaacctgggaaacagtgcagtccaagtcaaggtccttgttgtacagcacagtgtgcattcaagtcaaagtctgagaagtgtcgggatgattcagactgtgcaagggaaggaatatgtaatggcttcacagctctctgcccagcatctgaccctaaaccaaacttcacagactgtaataggcatacacaagtgtgcattaatgggcaatgtgcaggttctatctgtgagaaatatggcttagaggagtgtacgtgtgccagttctgatggcaaagatgataaagaattatgccatgtatgctgtatgaagaaaatggacccatcaacttgtgccagtacagggtctgtgcagtggagtaggcacttcagtggtcgaaccatcaccctgcaacctggatccccttgcaacgattttagaggttactgtgatgttttcatgcggtgcagattagtagatgctgatggtcctctagctaggcttaaaaaagcaatttttagtccagagctctatgaaaacattgctgaatggattgtggctcattggtgggcagtattacttatgggaattgctctgatcatgctaatggctggatttattaagatatgcagtgttcatactccaagtagtaatccaaagttgcctcctcctaaaccacttccaggcactttaaagaggaggagacctccacagcccattcagcaaccccagcgtcagcggccccgagagagttatcaaatgggacacatgagacgctaactgcagcttttgccttggttcttcctagtgcctacaatgggaaaacttcactccaaagagaaacctattaagtcatcatctccaaactaaaccctcacaagtaacagttgaagaaaaaatggcaagagatcatatcctcagaccaggtggaattacttaaattttaaagcctgaaaattccaatttgggggtgggaggtggaaaaggaacccaattttcttatgaacagatatttttaacttaatggcacaaagtcttagaatattattatgtgccccgtgttccctgttcttcgttgctgcattttcttcacttgcaggcaaacttggctctcaataaacttttaccacaaattgaaataaatatatttttttcaactgccaatcaaggctaggaggctcgaccacctcaacattggagacatcacttgccaatgtacataccttgttatatgcagacatgtatttcttacgtacactgtacttctgtgtgcaattgtaaacagaaattgcaatatggatgtttctttgtattataaaatttttccgctcttaattaaaaattactgtttaattgacatactcaggataacagagaatggtggtattcagtggtccaggattctgtaatgctttacacaggcagttttgaaatgaaaatcaatttaccccatggtacccggatcctcgaattc

SEQ ID NO: 215 - DNA, 1082 bp, Homo sapiens
  ref <308>: DATABASE ACCESSION NUMBER: AF038953
  ref <309>: DATABASE ENTRY DATE: 2001-06-18
gatcccagacctcggcttgcagtagtgttagactgaagataaagtaagtgctgtttgggctaacaggatctcctcttgcagtctgcagcccaggacgctgattccagcagcgccttaccgcgcagcccgaagattcactatggtgaaaatcgccttcaatacccctaccgccgtgcaaaaggaggaggcgcggcaagacgtggaggccctcctgagccgcacggtcagaactcagatactgaccggcaaggagctccgagttgccacccaggaaaaagagggctcctctgggagatgtatgcttactctcttaggcctttcattcatcttggcaggacttattgttggtggagcctgcatttacaagtacttcatgcccaagagcaccatttaccgtggagagatgtgcttttttgattctgaggatcctgcaaattcccttcgtggaggagagcctaacttcctgcctgtgactgaggaggctgacattcgtgaggatgacaacattgcaatcattgatgtgcctgtccccagtttctctgatagtgaccctgcagcaattattcatgactttgaaaagggaatgactgcttacctggacttgttgctggggaactgctatctgatgcccctcaatacttctattgttatgcctccaaaaaatctggtagagctctttggcaaactggcgagtggcagatatctgcctcaaacttatgtggttcgagaagacctagttgctgtggaggaaattcgtgatgttagtaaccttggcatctttatttaccaactttgcaataacagaaagtccttccgccttcgtcgcagagacctcttgctgggtttcaacaaacgtgccattgataaatgctggaagattagacacttccccaacgaatttattgttgagaccaagatctgtcaagagtaagaggcaacagatagagtgtccttggtaataagaagtcagagatttacaatatgactttaacattaaggtttatgggatactcaagatatttactcatgcatttactctattgcttatgccgtaaaaaaaaaaaaaaaaaaaaaaaaaaaaa

SEQ ID NO: 216 - DNA, 522 bp, Homo sapiens
  ref <308>: DATABASE ACCESSION NUMBER: AI660656
  ref <309>: DATABASE ENTRY DATE: 2001-06-18
tttattcttatgaatctatttaattgctcagactgggctagagaatacgtaccatgaaatacatatatttcataaggttcagttacaaaatggattgtttcaaatggcaatttcttacactaacctgattatgaaaaaaagaagtctgtatcatctgcttccaagtctgttatgtccaaatatattttaattatgcatttattttgctacttttataaatattagagatttcaccttaaattatttttgtaactagttctagaacatgttttccaattattatttttctaatggagacatataattgacctatgtttatgcatatatgttctctacacagtgaaactttttttaaaaagaatagtaaagaaaatgcggaagctctggctctccaaggcaaagtcaaaaaaaaaaaaaaaagcgggggggaatgcgaggaacattttattacacctcctgattttcactccttgagttttattttctccccttgtttatttgtttaatgctagaaactgtatt

SEQ ID NO: 217 - DNA, 438 bp, Homo sapiens
  Modified_base 1 ... 438: n = a,c,g, or t
  ref <308>: DATABASE ACCESSION NUMBER: AA192175
  ref <309>: DATABASE ENTRY DATE: 2001-06-18
aaggaattaaacatgggccagcgatgttcagatactagaggaattgtcttcgaagatgtgaaagtgcctaaagaaaatgttttaattggtgacggagctggtttcaaagttgcaatgggagcttttgataaaaccagacctgtagtagctgctggtgctgttggattagcacanagagctttggatgaagctaccaagtatgccctggaaaggaaaactttcggaaagctacttgtagagcaccaagcaatatcatttatgctggctgaaatggcaatgaagagttgaactagctagaatgagtttaccagagangcagctngggaggttgattctggtcgtcgaaatacctattatgcttctattgcaaagggcatttgcctgggaggatattggccaaatccggttaggctantggatggccgttncggaatancc

SEQ ID NO: 218 - DNA, 3215 bp, Homo sapiens
  ref <308>: DATABASE ACCESSION NUMBER: M19507
  ref <309>: DATABASE ENTRY DATE: 2001-06-18
gacaatatcaggtgagctgtggaggtggggtccttggaagctggatgacagcagctggcaaggggataagagagcagtgagcccctccctcaaggaggtctggctttatccatagacagggccctctgaggtggggctgaggtacaaagggggattgagcagcccaggagaagagagatgggggttcccttcttctcttctctcagatgcatggtggacttaggaccttgctgggctgggggtctcactgcagagatgaagctgcttctggccctagcagggctcctggccattctggccacgccccagccctctgaaggtgctgctccagctgtcctgggggaggtggacacctcgttggtgctgagctccatggaggaggccaagcagctggtggacaaggcctacaaggagcggcgggaaagcatcaagcagcggcttcgcagcggctcagccagccccatggaactcctatcctacttcaagcagccggtggcagccaccaggacggcggtgagggccgctgactacctgcacgtggctctagacctgctggagaggaagctgcggtccctgtggcgaaggccattcaatgtcactgatgtgctgacgcccgcccagctgaatgtgttgtccaagtcaagcggctgcgcctaccaggacgtgggggtgacttgcccggagcaggacaaataccgcaccatcaccgggatgtgcaacaacagacgcagccccacgctgggggcctccaaccgtgcctttgtgcgctggctgccggcggagtatgaggacggcttctctcttccctacggctggacgcccggggtcaagcgcaacggcttcccggtggctctggctcgcgcggtctccaacgagatcgtgcgcttccccactgatcagctgactccggaccaggagcgctcactcatgttcatgcaatggggccagctgttggaccacgacctcgacttcacccctgagccggccgcccgggcctccttcgtcactggcgtcaactgcgagaccagctgcgttcagcagccgccctgcttcccgctcaagatcccgcccaatgacccccgcatcaagaaccaagccgactgcatcccgttcttccgctcctgcccggcttgccccgggagcaacatcaccatccgcaaccagatcaacgcgctcacttccttcgtggacgccagcatggtgtacggcagcgaggagcccctggccaggaacctgcgcaacatgtccaaccagctggggctgctggccgtcaaccagcgcttccaagacaacggccgggccctgctgccctttgacaacctgcacgatgacccctgtctcctcaccaaccgctcagcgcgcatcccctgcttcctggcaggggacacccgttccagtgagatgcccgagctcacctccatgcacaccctcttacttcgggagcacaaccggctggccacagagctcaagagcctgaaccctaggtgggatggggagaggctctaccaggaagcccggaagatcgtgggggccatggtccagatcatcacttaccgggactacctgcccctggtgctggggccaacggccatgaggaagtacctgcccacgtaccgttcctacaatgactcagtggacccacgcatcgccaacgtcttcaccaatgccttccgctacggccacaccctcatccaacccttcatgttccgcctggacaatcggtaccagcccatggaacccaacccccgtgtccccctcagcagggtcttttttgcctcctggagggtcgtgctggaaggtggcattgaccccatcctccggggcctcatggccacccctgccaagctgaatcgtcagaaccaaattgcagtggatgagatccgggagcgattgtttgagcaggtcatgaggattgggctggacctgcctgctctgaacatgcagcgcagcagggaccacggcctcccaggatacaatgcctggaggcgcttctgtgggctcccgcagcctgaaactgtgggccagctgggcacggtgctgaggaacctgaaattggcgaggaaactgatggagcagtatggcacgcccaacaacatcgacatctggatgggcggcgtgtccgagcctctgaagcgcaaaggccgcgtgggcccactcctcgcctgcatcatcggtacccagttcaggaagctccgggatggtgatcggttttggtgggagaacgagggtgtgttcagcatgcagcagcgacaggccctggcccagatctcattgccccggatcatctgcgacaacacaggcatcaccaccgtgtctaagaacaacatcttcatgtccaactcatatccccgggactttgtcaactgcagtacacttcctgcattgaacctggcttcctggagggaagcctcctagaggccaggtaagggggtgcagcagtgaggggtatatctgggctggccagttggaaccacggagatctccttgccctagatgagcccagccctgttctgggtgcagctgagaaaatgagtgactagacgttcatttgtgtgctcatgtatgtgcgaagtatataaattggcttttcatgcgtgtgtgttgtctgaacatggggagtgtttcatgggttatgtgtatgtgccatttatgtgagtgtgtgtttgtgctgatgagaatactgagtatgtggaaggcagcagagcggactggtgaggagcacagctcaggaactagactgcctgggttccaatcctggctctgtggcttgctagctatgtgaccttgagcaaattaccctccttaaacaagagttttcttccttgtaaattacatctgtcatggtttcttggagggcccacttgtatcctctggttcttcatttattgagcacctactacatgcaaggcactgtactaggcgtgagaagcatatagaggcaagaaagagataccaagatgccatctgtgtcctggttagcagagctggaccagtggtgccttggagggataagccagctgcagctgggctgtgtggttgacttatgggcccagccagccaggctcaggccatggctcccctttttcttcctcaccctgatttcttgcttattcactgaagttctcctgaagaggaactgggcctgttgccctttctgtaccatttatttgctcccaatgtttatgataataaaggcaccgctgatggggacctcc

SEQ ID NO: 219 - DNA, 487 bp, Homo sapiens
  ref <308>: DATABASE ACCESSION NUMBER: AI142357
  ref <309>: DATABASE ENTRY DATE: 2001-06-18
cctcgtgagacgctatgcggggcggacgtttctcgagtccgggcattgtacaagcgcgtcttgcagctgcaccgtgttctgcccccggacctcaaatccctgggcgaccagtacgtgaaagacgaatttaggagacataagaccgttggttctgacgaggcacagcgtttcttgcaagaatgggaggtgtatgcaacagcgttattgcaacaggctaacgaaaacagacaaaattcaactggaaaagcatgttttggcaccttcctcccagaagaaaaacttaatgactttcgtgatgaacaaattggacagttgcaggagctgatgcaagaagccacaaaacccaataggcaatttagtatttctgagtctatgaaaccaaaattttagtctatacaacaaagcttaataagacatgcaaaaatttagaacccctactttaactgtcattggtttttgaaatatatttaagctttgaaaacacctg

SEQ ID NO: 220 - DNA, 638 bp, Homo sapiens
  ref <308>: DATABASE ACCESSION NUMBER: AA921856
  ref <309>: DATABASE ENTRY DATE: 2001-06-18
ttttcaccagacacactgtatttttatttacttattaagtaactggaacgctgtctctgtctctctgccgggatgtaatatccagaagggcagggatttttgtctgttttccttgctgctgtggcaccggtgcctgtcccagcacagtacctggcccctagccagggctcactgaacgtcgcttgaggaagaaacaagggatgacctttgatgccagagtcagaaacacggtttttggtgccgcatgtccgcccctctctgtggacagggggaggcggtggggaaggcccaggtctcccagagcaactggttttgctccctgaggggcttgctggcctcctggggtggaggtgtcaccaggggcaggattcctgctgagcaagtgaaacacccgctgcaggcagcagagggtgcagctgagagttggtcacgattgcacttccgactttggagacccagaaccactccagcggaggccctgggggagccccttcccttttggaggaaggaaagggagacctgtttgctggctgagtcggggtgtgaagcaggtttgggcaggatgaggagggcgaattgggaaggagggggaggtgggggctggatttaaaatgggggcaggccttgcctcgtgccga

SEQ ID NO: 221 - DNA, 484 bp, Homo sapiens
  ref <308>: DATABASE ACCESSION NUMBER: AI051327
  ref <309>: DATABASE ENTRY DATE: 2001-06-18
agtttataaatatttatgctcaaaggacagatcaactgaatatttttggtcttgtttacaagataaatcatactttaaaatgatacaggcccctcaagtgtcttaggaaaaagtcattggtgctataaaacctttcagtatcatttttgaacccattgttcagactttgctaggttttaatctgattccttgtgatttattataatgtagcagcatacttataaaagtggtctgtgctgagtcagagagcccagcccattagaaacacatcataatttaagaatatgatgcagaatgcccttacacttatttgtgcccagcttcccaaaaagaaaattgttttgttaagaggaaggcagttaatttggctagaatccaaaaactcattcagcatggctgttttcccttatttcaaatgaaaaacttttctaatactaaaatatgtaatcctgctttgctttaaatttccatgtctgtcactcaa

SEQ ID NO: 222 - DNA, 1284 bp, Homo sapiens
  ref <308>: DATABASE ACCESSION NUMBER: AF006259
  ref <309>: DATABASE ENTRY DATE: 2001-06-18
ctgaagccaacaagatttgagaactgtaaataccaagccttgaaagggaccatggtgcggcctgtgagacataagaaaccagtcaattactcacagtttgaccactctgacagtgatgatgattttgtttctgcaactgtacctttaaacaagaaatccagaacagcaccaaaggagttaaaacaagataaaccaaaacctaacttgaacaatctccggaaagaagaaatcccagtacaagagaaaacccctaaaaaaaggatggctttagatgacaagctctaccagagagacttagaagttgcactagctttatcagtgaaggaacttccaacagtcaccactaatgtgcagaactctcaagataaaagcattgaaaaacatggcagtagtaaaatagaaacaatgaataagtctcctcatatctctaattgcagtgtagccagtgattatttagatttggataagattactgtggaagatgatgttggtggtgttcaagggaaaagaaaagcagcatctaaagctgcagcacagcagaggaagattcttctggaaggcagtgatggtgatagtgctaatgacactgaaccagactttgcacctggtgaagattctgaggatgattctgatttttgtgagagtgaggataatgacgaagacttctctatgagaaaaagtaaagttaaagaaattaaaaagaaagaagtgaaggtaaaatccccagtagaaaagaaagagaagaaatctaaatccaaatgtaatgctttggtgacttcggtggactctgctccagctgccgtcaaatcagaatctcagtccttgccaaaaaaggtttctctgtcttcagataccactaggaaaccattagaaatacgcagtccttcagctgaaagcaagaaacctaaatgggtcccaccagcggcatctggaggtagcagaagtagcagcagcccactggtggtagtgtctgtgaagtctcccaatcagagtctccgccttggcttgtccagattagcacgagttaaacctttgcatccaaatgccactagcacctgagtgtggtacaggaggaatgtttggttgggagaatcacagctttacaagggtgtttatatttgatttgtgtttatatttgaggcaggtattgtaatataaaggaatccattaccatgtcctataaatgacctctagccattttatgattatgttctctgtaaaactcttcaagacttcaatgagaagtttgtttataagaattatcttctcatacctttccttgtg

SEQ ID NO: 223 - DNA, 3408 bp, Homo sapiens
  ref <308>: DATABASE ACCESSION NUMBER: D86864
  ref <309>: DATABASE ENTRY DATE: 2001-06-18
cgagcgctcccaccgagctgcctgccatggggctggggctgctgctcccgctgctgctgctctggactcgggggactcaggggtccgagctggaccccaaagggcagcacgtctgtgtggccagcagcccctctgctgagctgcagtgctgcgcaggctggaggcagaaggatcaagaatgcaccatccccatctgtgaggggccggacgcctgccagaaagacgaggtgtgtgtgaagccgggcctctgtcgatgcaagcctggattctttggggcccactgcagctcccgctgcccgggccagtactggggccccgactgccgtgagagctgcccctgccacccgcacggccagtgcgagccagccacgggcgcgtgccagtgccaggccgaccgctggggagcccgctgcgagttcccgtgcgcctgcggcccccacgggcgctgcgaccccgcgaccggcgtgtgccactgcgaacccggctggtggtcgtccacgtgccgccgcccgtgccagtgcaacaccgcggcggcgcgctgcgagcaggccacgggcgcctgcgtgtgcaagccgggctggtgggggcgccgctgcagcttccgctgcaactgccacggctccccgtgcgagcaggactccggccgctgcgcctgccggccgggctggtggggtcccgaatgccagcagcagtgcgagtgtgtgcggggccgctgcagcgccgcctccggcgagtgcacctgcccgcccggcttccgcggagcgcgctgcgagctgccctgcccggcaggcagccacggggtgcagtgcgcacacagctgtggccgctgcaaacacaatgagccgtgctctccagacacaggcagctgtgagtcctgcgagccgggctggaacgggacccagtgccagcagccctgcctgcctggcacctttggcgagagctgcgaacagcagtgccctcactgccgacatggggaggcctgtgagccagatactggccactgtcagcgctgtgaccctggctggctggggcccaggtgtgaagacccctgccccactggtacctttggggaagactgtggctctacctgccccacctgtgttcaggggtcctgtgatactgtgacaggggactgtgtctgcagtgccggctactgggggcccagctgcaacgcctcctgcccagccggtttccatggaaacaactgctcagttccttgtgaatgcccagagggactctgccaccctgtctctgggtcctgccagccaggctctggcagtcgggacactgccctcatcgtgggcagccttgtgcctctgctgctgctcttcctgggtcttgcctgctgtgcctgctgctgctgggccccccgatcagacctcaaggacaggccagcgagagatggagctaccgtgtccaggatgaagctgcaggtctgggggacactgaccagcttgggctccacgctgccctgccgttccctcagctcccacaagctaccctgggtgacagtctcacatcacgacccggaggtccccttcaaccacagcttcatcgagccgccctctgccggctgggccactgatgactccttctcatccgatcctgagtctggagaggcagatgaggttcctgcctactgtgtgccaccccaagaagggatggtccctgtggcccaggcagggtcgtcagaggccagcctggctgcaggtgctttcccgccccctgaggacgcctccacgccattcgccatcccgcgcacctccagcctagctcgggccaagcggccatcggtctccttcgcggaaggtaccaagtttgcaccacagagtcgccgaagctcaggggagctctccagcccgctccgaaagcccaagaggctctcccggggggcgcagtcgggtcctgagggccgggaagccgaagagtccacaggcccagacgaagcagaagcccccgagtcctttccggcggctgccagtcccggggattcagccactggccaccggcggcccccacttggtagccggacagtggctgagcacgtggaagccattgagggcagcgtccaggagagctcgggccctgtgaccacgatctacatgctggcagggaagccccgcggatccgaaggccctgtccgctctgtcttccgccattttggtagcttccagaaaggccaggcggaagccaaggtcaagagggccatccctaagcctccgcgccaggccctgaatcggaaaaagggcagccctggccttgcctctggctctgtcggccagagccccaactcagccccaaaagctgggcttcctggggccacagggcctatggcagtcagaccagaggaagcggtccgggggctgggggctggcaccgagagttcaaggagagcccaggagccagtctctggctgtggctccccagaacaggatccccagaagcaggctgaagaggaaaggcaggaggaacctgagtatgagaatgttgtacccatctccaggccaccagaaccctgatgaccttgaatttggggagtggggagagtggatggactagactgtgctgtgtgctggaaaatgatcccggggccaggacagacaaaccagagcctctgcgcctccacagggaaaaggcaaggcttccaggccagttggcccaggcccctggcagtgctcccggaggggcccaggaaggcctgggcagagaccctgtaggatggggtcaggaagggttgcctgcagggacttttgctctgctgtcctggaccctgtgtgcctcataagggctattctttctttcacgtgcaaaacatttttctgaaatagcaaacaacctacatgtttgctgataaaagattggctaaacaaaattttttttttttttgagacagaatctccctctgtcccccaggctggagtgcagtggtgcgatctcggctcactgcaagctctgcctcccgggttcacgcccttctcctgcctcagcctcccgagtagctgggactacaggtgccctccaccacgcttggctaatttttttgtatatttaatagagacagggtttcaccatgttagccaggatggtctcgatctcctgacctcgtgatccacctgcctcggcctccccaaagtgctgggatgacaggcatgagccaccacgcctggtctatgaactttttaaaaaggatgtatgtgtataaacagattcaagggaaaggcactaaatggttttttcctctggaagatgagattgtaggtgatatttattttcttctgaaacttttgtatagtttgcaaattttctacagtgaacattcttttttacttttgttactagattgaatttgataaagtataataaaaagcaatgatctttgttaaaaaataaaaagtactaacattacag

SEQ ID NO: 224 - DNA, 1798 bp, Homo sapiens
  ref <308>: DATABASE ACCESSION NUMBER: X69804
  ref <309>: DATABASE ENTRY DATE: 2001-06-18
tttttttttttttttttttttttacctccaccgccttctagtctcaccgaaggcttgtggccatctctgtaaagtttctggggaggtgggcacggggtaaacgccggagggttctgtggagcctatgggactgactggaggccaaagaactttgggccgcagatgtacaccagcgtcactcttttggtctgttagggccttcatcgctcacatcaggtttcagtgtgaaacgggaaaacatagccgcaatggctgaaaatggtgataatgaaaagatggctgccctggaggccaaaatctgtcatcaaattgagtattattttggcgacttcaatttgccacgggacaagtttctaaaggaacagataaaactggatgaaggctgggtacctttggagataatgataaaattcaacaggttgaaccgtctaacaacagactttaatgtaattgtggaagcattgagcaaatccaaggcagaactcatggaaatcagtgaagataaaactaaaatcagaaggtctccaagcaaacccctacctgaagtgactgatgagtataaaaatgatgtaaaaaacagatctgtttatattaaaggcttcccaactgatgcaactcttgatgacataaaagaatggttagaagataaaggtcaagtactaaatattcagatgagaagaacattgcataaagcatttaagggatcaatttttgttgtgtttgatagcattgaatctgctaagaaatttgtagagacccctggccagaagtacaaagaaacagacctgctaatacttttcaaggacgattactttgccaaaaaaaatgaagaaagaaaacaaaataaagtggaagctaaattaagagctaaacaggagcaagaagcaaaacaaaagttagaagaagatgctgaaatgaaatctctagaagaaaagattggatgcttgctgaaattttcgggtgatttagatgatcagacctgtagagaagatttacacatacttttctcaaatcatggtgaaataaaatggatagacttcgtcagaggagcaaaagaggggataattctatttaaagaaaaagccaaggaagcattgggtaaagccaaagatgcaaataatggtaacctacaattaaggaacaaagaagtgacttgggaagtactagaaggagaggtggaaaaagaagcactgaagaaaataatagaagaccaacaagaatccctaaacaaatggaagtcaaaaggtcgtagatttaaaggaaaaggaaagggtaataaagctgcccagcctgggtctggtaaaggaaaagtacagtttcagggcaagaaaacgaaatttgctagtgatgatgaacatgatgaacatgatgaaaatggtgcaactggacctgtgaaaagagcaagagaagaaacagacaaagaagaacctgcatccaaacaacagaaaacagaaaatggtgctggagaccagtagtttagtaaaccaattttttattcattttaaataggttttaaacgacttttgtttgcggggcttttaaaaggaaaaccgaattaggtccacttcaatgtccacctgtgagaaaggaaaaatttttttgttgtttaacttgtctttttgttatgcaaatgagatttctttgaatgtattgttctgtttgtgttatttcagatgattcaaatatcaaaaggaagattcttccattaaattgcctttgtaatatgagaatgtattagtacaaactaactaataaaatatatactatatgaaaaaaaaaaaaaaaaaaaaaaaaaaaa

SEQ ID NO: 225 - DNA, 1324 bp, Homo sapiens
  ref <308>: DATABASE ACCESSION NUMBER: X82240
  ref <309>: DATABASE ENTRY DATE: 2001-06-18
cttgagaggctctggctcttgcttcttaggcggcccgaggacgccatggccgagtgcccgacactcggggaggcagtcaccgaccacccggaccgcctgtgggcctgggagaagttcgtgtatttggacgagaagcagcacgcctggctgcccttaaccatcgagataaaggataggttacagttacgggtgctcttgcgtcgggaagacgtcgtcctggggaggcctatgacccccacccagataggcccaagcctgctgcctatcatgtggcagctctaccctgatggacgataccgatcctcagactccagtttctggcgcttagtgtaccacatcaagattgacggcgtggaggacatgcttctcgagctgctgccagatgactgatgtatggtcttggcagcacctgtctcctttcaccccagggcctgagcctggccagcctacaatggggatgttgtgtttctgttcaccttcgtttactatgcctgtgtcttctccaccacgctggggtctgggaggaatggacagacagaggatgagctctacccagggcctgcaggacctgcctgtagcccactctgctcgccttagcactaccactcctgccaaggaggattccatttggcagagcttcttccaggtgcccagctatacctgtgcctcggcttttctcagctggatgatggtcttcagcctctttctgtcccttctgtccctcacagcactagtatttcatgttgcacacccactcagctccgtgaacttgtgagaacacagccgattcacctgagcaggacctctgaaaccctggaccagtggtctcacatggtgctacgcctgcatgtaaacacgcctgcaaacgctgcctgccggtaaacacgcctgcaaacgctgcctgcccgtaaacacgcctgcaaacgctgcctgcccacacaggttcacgtgcagctcaaggaaaggcctgaaaggagcccttatctgtgctcaggactcagaagcctctgggtcagtggtccacatcccgggacgcagcaggaggccaggccggcgagccctgtggatgagccctcagaacccttggcttgcccacgtggaaaagggatagaggttgggtttcccccctttatagatggtcacgcacctgggtgttacaaagttgtatgtggcatgaatactttttgtaatgattgattaaatgcaagatagtttatctaacttcgtgcgcaatcagcttctatccttgacttagattctggtggagagaagtgagaataggcagcccccaaataaaaaatattcatggaaaaaaaaaaaaaaa

SEQ ID NO: 226 - DNA, 1380 bp, Homo sapiens
  ref <308>: DATABASE ACCESSION NUMBER: X04217
  ref <309>: DATABASE ENTRY DATE: 2001-06-18
agcaggtcctactatcgcctccctctagtctctgcttctttggatccctgaggagggcagaaggaagaaaacagcccaaagatgagagtgattcgcgtgggtacccgcaagagccagcttgctcgcatacagacggacagtgtggtggcaacattgaaagcctcgtaccctggcctgcagtttgaaatcattgctatgtccaccacaggggacaagattcttgatactgcactctctaagattggagagaaaagcctgtttaccaaggagcttgaacatgccctggagaagaatgaagtggacctggttgttcactccttgaaggacctgcccactgtgcttcctcctggcttcaccatcggagccatctgcaagcgggaaaaccctcatgatgctgttgtctttcacccaaaatttgttgggaagaccctagaaaccctgccagagaagagtgtggtgggaaccagctccctgcgaagagcagcccagctgcagagaaagttcccgcatctggagttcaggagtattcggggaaacctcaacacccggcttcggaagctggacgagcagcaggagttcagtgccatcatcctagcaacagctggcctgcagcgcatgggctggcacaaccgggttgggcagatcctgcaccctgaggaatgcatgtatgctgtgggccagggggccttgggcgtggaagtgcgagccaaggaccaggacatcttggatctggtgggtgtgctgcacgatcccgagactctgcttcgctgcatcgctgaaagggccttcctgaggcacctggaaggaggctgcagtgtgccagtagccgtgcatacagctatgaaggatgggcaactgtacctgactggaggagtctggagtctagacggctcagatagcatacaagagaccatgcaggctaccatccatgtccctgcccagcatgaagatggccctgaggatgacccacagttggtaggcatcactgctcgtaacattccacgagggccccagttggctgcccagaacttgggcatcagcctggccaacttgttgctgagcaaaggagccaaaaccatcctggatgttgcacggcagcttaacgatgcccattaactggtttgtggggcacagatgcctgggttgctgctgtccagtgcctacatcccgggcctcagtgccccattctcactgctatctggggagtgattaccccgggagactgaactgcagggttcaagccttccagggatttgcctcaccttggggccttgatgactgccttgcctcctcagtatgtgggggcttcatctctttagagaagtccaagcaacagcctttgaatgtaaccaatcctactaataaaccagttctgaaggt

SEQ ID NO: 227 - DNA, 466 bp, Homo sapiens
  ref <308>: DATABASE ACCESSION NUMBER: AI357189
  ref <309>: DATABASE ENTRY DATE: 2001-06-18
ttttttttttttttttttttttttttttttttttttttttttttttttttttttttttttttttttaaaacggggaaaaaaagggtaaaaaaaaaaccaaggcccccccaaaccccaaaaatttaaaacccccggggttttaatcccaaaaaggcccaaaggggaaaggggttccccccaatccccctttattttaaccaaaaaaaaaaagggggttcctttcccaaaagggcaaaaaaaatggggcgggaacccccccttggggggccccccaattttaaaggaaaaccccaaccggcccttcccccgggggtttaaaagggcccctaccatttaagggcccttttttttccaaaaagggggcgaaaaaaaaccccccccaaccaaaaggggtttcccattttttgggggcggagaaaaaaaaccccgggcttccccgggggaacccaatgggaaggaaggccgg

SEQ ID NO: 228 - DNA, 1722 bp, Homo sapiens
  ref <308>: DATABASE ACCESSION NUMBER: S57235
  ref <309>: DATABASE ENTRY DATE: 2001-06-18
gcgggcggttcagccatgaggctggctgtgcttttctcgggggccctgctggggctactggcagcccaggggacagggaatgactgtcctcacaaaaaatcagctactttgctgccatccttcacggtgacacccacggttacagagagcactggaacaaccagccacaggactaccaagagccacaaaaccaccactcacaggacaaccaccacaggcaccaccagccacggacccacgactgccactcacaaccccaccaccaccagccatggaaacgtcacagttcatccaacaagcaatagcactgccaccagccagggaccctcaactgccactcacagtcctgccaccactagtcatggaaatgccacggttcatccaacaagcaacagcactgccaccagcccaggattcaccagttctgcccacccagaaccacctccaccctctccgagtcctagcccaacctccaaggagaccattggagactacacgtggaccaatggttcccagccctgtgtccacctccaagcccagattcagattcgagtcatgtacacaacccagggtggaggagaggcctggggcatctctgtactgaaccccaacaaaaccaaggtccagggaagctgtgagggtgcccatccccacctgcttctctcattcccctatggacacctcagctttggattcatgcaggacctccagcagaaggttgtctacctgagctacatggcggtggagtacaatgtgtccttcccccacgcagcaaagtggacattctcggctcagaatgcatcccttcgagatctccaagcacccctggggcagagcttcagttgcagcaactcgagcatcattctttcaccagctgtccacctcgacctgctctccctgaggctccaggctgctcagctgccccacacaggggtctttgggcaaagtttctcctgccccagtgaccggtccatcttgctgcctctcatcatcggcctgatccttcttggcctcctcgccctggtgcttattgctttctgcatcatccggagacgcccatccgcctaccaggccctctgagcatttgcttcaaaccccagggcactgagggggtttggggtgtggtgggggggtacccttatttcctcgacacgccgctggctcaaagacaatgttattttccttccctttcttgaagaacaaaaagaaagccgggcatgacggctcatgcctgtaatcccagcactttgggaggctgaggcaggtggatcactggaggtcaggtctttgaggccagccctagccaacatggtgtaaacactgtctctactaaaaatacaattagccaggtgtggcggcgtaatcccatgctaacctgtaatcccagctacttgggaggctgaggcagagctgcttgaaccctggaagtggaggttgcagtgagcctgtcatcgctccactgagccaagatcgctcccactgcactccagcctgggcgacagagccagactgtctcaaataaataaatatgagataatgcagtcgggagaagggagggagagaattttattaaatgtgacgaactgcccccccccccccccccagcaggagagcagcaaaatttatgtaaatctttgacggggttttccttgctcctgccaggattaaaagtccatgagtttcttgctcaaaaaaaaaaaaaaaaaaaaaaaaaaaaaaaaa

SEQ ID NO: 229 - DNA, 417 bp, Homo sapiens
  ref <308>: DATABASE ACCESSION NUMBER: AA926854
  ref <309>: DATABASE ENTRY DATE: 2001-06-18
cctcagtaaatacccgctatttttattcctttttgtatattgtgacactgagtggcagaaaacttctgagaatttgcagaaactcattgaaaccttactctgatttttccttcatgtcttctcttgctccagctgtgaaatgagtcttcaaatctgagtgccggttgacaaatgctgatagttgtcaaataagtgtagcttgtaatgcgagcccatttgtgatgatgagggcacgctatgccagactttcagctgtccacagttgagtacgccatacatttctcagattctttctctcttcttaatacctggaacagtcagatgccatcatcaatgagttgaagatttgtgtcagctgctctgcatgaagagaacttaaaacttgttattagaaatagttattctgagtcataagct

SEQ ID NO: 230 - DNA, 1617 bp, Homo sapiens
  ref <308>: DATABASE ACCESSION NUMBER: L01406
  ref <309>: DATABASE ENTRY DATE: 2001-06-18
agcagccaaggcttactgaggctggtggagggagccactgctgggctcaccatggaccgccggatgtggggggcccacgtcttctgcgtgttgagcccgttaccgaccgtattgggccacatgcacccagaatgtgacttcatcacccagctgagagaggatgagagtgcctgtctacaagcagcagaggagatgcccaacaccaccctgggctgccctgcgacctgggatgggctgctgtgctggccaacggcaggctctggcgagtgggtcaccctcccctgcccggatttcttctctcacttcagctcagagtcaggggctgtgaaacgggattgtactatcactggctggtctgagccctttccaccttaccctgtggcctgccctgtgcctctggagctgctggctgaggaggaatcttacttctccacagtgaagattatctacaccgtgggccatagcatctctattgtagccctcttcgtggccatcaccatcctggttgctctcaggaggctccactgcccccggaactacgtccacacccagctgttcaccacttttatcctcaaggcgggacgtgtgttcctgaaggatgctgcccttttccacagcgacgacactgaccactgcagcttctccactgttctatgcaaggtctctgtggccgcctcccatttcgccaccatgaccaacttcagctggctgttggcagaagccgtctacctgaactgcctcctggcctccacctcccccagctcaaggagagccttctggtggctggttctcgctggctgggggctgcccgtgctcttcactggcacgtgggtgagctgcaaactggccttcgaggacatcgcgtgctgggacctggacgacacctccccctactggtggatcatcaaagggcccattgtcctctcggtcggggtgaactttgggctttttctcaatattatccgcatcctggtgaggaaactggagccagctcagggcagcctccatacccagtctcagtattggcgtctctccaagtcgacacttttcctgatcccactctttggaattcactacatcatcttcaacttcctgccagacaatgctggcctgggcatccgcctccccctggagctgggactgggttccttccagggcttcattgttgccatcctctactgcttcctcaaccaagaggtgaggactgagatctcacggaagtggcatggccatgaccctgagcttctgccagcctggaggacccgtgctaagtggaccacgccttcccgctcggcggcaaaggtgctgacatctatgtgctaggctgcctcatcacgccactggagtccacacttgaatttgggcagctaccacgggtctgccatgctctggaggagcaagggggccacatccccaccccagctgttacccagcccggggcaggtgcagcccttcctccctgtctctgcatctgactctcttttgaggtccctgtatgtctacctctgacttctgtggtccctctgtgtctgctctcatccattcctcttactggggcctggggctctagcccaaggctcagaggagccaataaacctgtaaatgaaaaaaaaaaaa

SEQ ID NO: 231 - DNA, 516 bp, Homo sapiens
  Modified_base 1 ... 516: n = a,c,g, or t
  ref <308>: DATABASE ACCESSION NUMBER: R45298
  ref <309>: DATABASE ENTRY DATE: 2001-06-18
tttttttttttaagcgttaaaagaacacattttatcttttaaatgtgtgtacacagtacagttgacttttttgtatacaattctatgagtttaaacacacatatagattagcgtaaccactaattataagattgtagggaactggggaaaaaatgcatgcattaaggaatgatacggcatatttgggggacagagaacaggcttgatgaggacagagtctatttaaaagagacagtgggcaccgcaattggaggggaaggcggggcagggttttagagaacccctgagtgctgggctacaggattcagtaaagttattgatgagattggctgcattgtggattctgaaatatttatttaatacctcgaggagggtgtgagtagattgtgctgatgatccgcataactctgactatactaaggaccactgagttgcacccagagcttgccttactgagcgnttaccattagggaggtttcgcgtattccctanttaatctaaggtgactgantgtaa

SEQ ID NO: 232 - DNA, 824 bp, Homo sapiens
  ref <308>: DATABASE ACCESSION NUMBER: Y09397
  ref <309>: DATABASE ENTRY DATE: 2001-06-18
ccccgggcataactcagtcaagctcagtgagcattctcagcacattgcctcaacagcttcaaggtgagccagctcaagactttgctctccaccaggcagaagatgacagactgtgaatttggatatatttacaggctggctcaggactatctgcagtgcgtcctacagataccacaacctggatcaggtccaagcaaaacgtccagagtgctacaaaatgttgcgttctcagtccaaaaagaagtggaaaagaatctgaagtcatgcttggacaatgttaatgttgtgtccgtagacactgccagaacactattcacccaagtgatggaaaaggagtttgaagacggcatcattaactggggaagaattgtaaccatatttgcatttgaaggtattctcatcaagaaacttctacgacagcacattgccccggatgtggatacctataaggagatttcatattttgttgcggagttcataatgaataacacaggagaatggataaggcaaaacggaggctgggaaaatggctttgtaaagaagtttgaacctaaatctggctggatgacttttctagaagttacaggaaagatctgtgaaatgctatctctcctgaagcaatactgttgaccagaaaggacactccatattgtgaaaccggcctaatttttctgactgatatggaaacgattgccaacacatacttctacttttaaataaacaactttgatgatgtaacttgaccttccagagttatggaaattttgtccccatgtaatgaataaattgtatgtatttttctctaaaaaaaaaaaaaaaaaaaa

SEQ ID NO: 233 - DNA, 539 bp, Homo sapiens
  ref <308>: DATABASE ACCESSION NUMBER: AI336937
  ref <309>: DATABASE ENTRY DATE: 2001-06-18
ttttttttacagcatttgaaattattttattcagaaaagttcatgctgggcatgtatgccaagctccgagctaagctccaaggatccagaaatatatgagaaacagtgtcttgccctataggagctctggagaaagagaaatggagacaatgaagagaatctagccttggccttgaatagggaaacgaaaggcaatactggggtttggccttgagtagacatccagaatacaccattccaggactagcataacatactaggctgctgaggatggtctctcttggaggtagttcagaagtgggagagggagctgtggcactggtaggacagaaacttcaaagaccaggtggtggcgtctgatatagagccagctgattgccctttccaggtgagttccaggtggtaagggaaaagggaaaagagaccagttccctgggctgttagctaactccatgatgaccaatggaagagcttcagggtagggacactattgaaaaatcaggaccagcaatatgggtgaaacaggacacttctcctgt

SEQ ID NO: 234 - DNA, 3206 bp, Homo sapiens
  ref <308>: DATABASE ACCESSION NUMBER: U22526
  ref <309>: DATABASE ENTRY DATE: 2001-06-18
cccttgcctactgctcatgggtgtggagactgatattctggaagactgataggcagatttactattaacaaacacatagtctgtggcccagcaaagccaccccaatccctgcacaagggtaaaaggccagcattagagcactgcagcagcaatgacggagggcacgtgtctgcggcgccgagggggcccctacaagaccgagcccgccaccgacctcggccgctggcgactcaactgcgagaggggccggcagacgtggacctacctgcaggacgagcgcgccggccgcgagcagaccggcctggaagcctacgccctggggctggacaccaagaattactttaaggacttgcccaaagcccacaccgcctttgagggggctctgaacgggatgacattttacgtggggctgcaggctgaggatgggcactggacgggtgattatggtggcccacttttcctcctgccaggcctcctgatcacttgccacgtggcacgcatccctctgccagccggatacagagaagagattgtgcggtacctgcggtcagtgcagctccctgacggtggctggggcctgcacattgaggataagtccaccgtgtttgggactgcgctcaactatgtgtctctcagaattctgggtgttgggcctgacgatcctgacctggtacgagcccggaacattcttcacaagaaaggtggtgctgtggccatcccctcctgggggaagttctggctggctgtcctgaatgtttacagctgggaaggcctcaataccctgttcccagagatgtggctgtttcctgactgggcaccggcacacccctccacactctggtgccactgccggcaggtgtacctgcccatgagctactgctacgccgttcggctgagtgccgcggaagacccgctggtccagagcctccgccaggagctctatgtggaggacttcgccagcattgactggctggcgcagaggaacaacgtggcccccgacgagctgtacacgccccacagctggctgctccgcgtggtatatgcgctcctcaacctgtatgagcaccaccacagtgcccacctgcggcagcgggccgtgcagaagctgtatgaacacattgtggccgacgaccgattcaccaagagcatcagcatcggcccgatctcgaaaaccatcaacatgcttgtgcgctggtatgtggacgggcccgcctccactgccttccaggagcatgtctccagaatcccggactatctctggatgggccttgacggcatgaaaatgcagggcaccaacggctcacagatctgggacaccgcattcgccatccaggctctgcttgaggcgggcgggcaccacaggcccgagttttcgtcctgcctgcagaaggctcatgagttcctgaggctctcacaggtcccagataaccctcccgactaccagaagtactaccgccagatgcgcaagggtggcttctccttcagtacgctggactgcggctggatcgtttctgactgcacggctgaggccttgaaggctgtgctgctcctgcaggagaagtgtccccatgtcaccgagcacatccccagagaacggctctgcgatgctgtggctgtgctgctgaacatgagaaatccagatggagggttcgccacctatgagaccaagcgtggggggcacttgctggagctgctgaacccctcggaggtcttcggggacatcatgattgactacacctatgtggagtgcacctcagccgtgatgcaggcgcttaagtatttccacaagcgtttcccggagcacagggcagcggagatccgggagaccctcacgcagggcttagagttctgtcggcggcagcagagggccgatggctcctgggaaggctcctggggagtttgcttcacctacggcacctggtttggcctggaggccttcgcctgtatggggcagacctaccgagatgggactgcctgtgcagaggtctcccgggcctgtgacttcctgctgtcccggcagatggcagacggaggctggggggaggactttgagtcctgcgaggagcggcgttatttgcagagtgcccagtcccagatccataacacatgctgggccatgatggggctgatggccgttcggcatcctgacatcgaggcccaggagagaggagtccggtgtctacttgagaaacagctccccaatggcgactggccgcaggaaaacattgctggggtcttcaacaagtcctgtgccatctcctacacgagctacaggaacatcttccccatctgggccctcggccgcttctcccagctgtaccctgagagagcccttgctggccacccctgagaacatgcctacctgctgggtgccgtctgtgcgttccagtgaggccaaggggtcctggccgggttggggagccctcccataaccctgtcttgggctccaacccctcaacctctatctcatagatgtgaatctgggggccaggctggaggcagggatggggacagggtgggtggcttagactcttgatttttactgtaggttcatttctgaaagtagcttgtcgggcttgggtgaggaagggggcacaggagccgtgacccctgaggaggcacagcgccttctgccacctctgggcacggcctcaaggtagtgaggctaggaggttttttctgaccaatagctgagttcttgggagaggagcagctgtgcctgtgtgattccttagtgtcgagtgggctctgggctggggtcggccctgggcaggcttctcctgcaccttttgtctgctgggctgagggacacgagggcaaccctgtgacaatggcaggtagtgtgcatccgtgaatagcccagtgcgggggttgctcatggagcatcctgaggccgtgcagcagggagccccatgcccctgggtcgtgagcttgcctgcgtatggggtggtgtcatggagcctcatgcccctgggtcgtgagctcgcctgagtatggggtggtgtcatggagccgcatacccctgggttgtgagctcgcctgcatatgcagggtctgtcatggaacatcccaagtctgtgcagcagggagccccatgcccctgggacatgaacccacctgcgtggaatgctgtttgtgaggtgtctacagggtttatagtagtcttgtggacacagaaatgcacaggggacacttacggacacaga

SEQ ID NO: 235 - DNA, 2228 bp, Homo sapiens
  ref <308>: DATABASE ACCESSION NUMBER: AF088868
  ref <309>: DATABASE ENTRY DATE: 2001-06-18
cttaagagcgcggccggaaagcagttgagttacagacatcctgccaaaatgatttcttcaaagcccagacttgtcgtaccctatggcctcaagactctgctcgagggaattagcagagctgttctcaaaaccaacccatcaaacatcaaccagtttgcagcagcttattttcaagaacttactatgtatagagggaatactactatggatataaaagatctggttaaacaatttcatcagattaaagtagagaaatggtcagaaggaacgacaccacagaagaaattagaatgtttaaaagaaccaggaaaaacatctgtagaatctaaagtacctacccagatggaaaaatctacagacacagacgaggacaatgtaaccagaacagaatatagtgacaaaaccacccagtttccatcagtttatgctgtgccaggcactgagcaaacggaagcagttggtggtctttcttccaaaccagccacccctaagactactaccccaccctcatcaccacctccaacagctgtctcaccagagtttgcctacgtcccagctgacccagctcagcttgctgctcagatgttaggtaaagtttcatctattcattctgatcaatctgatgtgttaatggtggatgtggcaaccagtatgcctgttgttatcaaggaggtgccaagctcagaggctgctgaagatgtcatggtggctgctcctcttgtgtgttctggaaaggtgctagaagtgcaggttgtgaaccaaacatctgtccatgtagatttgggttctcaacctaaagaaaatgaggctgaaccatcaacggcttcctcagtccccttgcaggatgaacaagaacctcctgcttatgatcaagctcctgaggtcactttgcaggctgatattgaggttatgtcaactgttcatatatcatctgtctataacgatgtgcctgtgactgaaggagttgtttatatcgagcaactgccagaacaaatagttatcccttttactgatcaagttgcttgtcttaaagaaaatgagcagtcaaaagaaaatgagcagtcaccacgagttagtcccaaatctgtagtagaaaagaccacctctggcatgtctaaaaaatctgtagagtccgtaaaacttgcacagttggaggagaatgcaaaatattcctcagtatatatggaggcagaagcaacagctctgctctctgacacatctttgaaaggtcagcctgaggtacctgcacaactcctggatgcagaaggtgctatcaaaataggctctgaaaaatctctgcaccttgaagtggaggtcacttcaatagtctctgacaatactgggcaggaggagtctggggaaaactctgtaccccaggagatggaaggcagacctgtgctctctggggaagctgcagaagcagtgcactcaggtacatctgtaaagtcatctagtggccccttccctcctgctccagaaggccttactgcaccagaaattgaaccagaaggggaatcaacagctgaataaggtttgatgaagccagcaatggcaacaagtgaacgaggacaaccaccaccatgttctaacatgtggaccctttattgtctaactgataagaatcaacaaggtcacccatcaccgccacctgcacctgggccttttccccaagcaaccctctatttacctaatcctaaggatccacagtttcagcagcatccaccaaaagtcacttttccaacttatgtgatgggcgacaccaagaagaccagtgccccaccttttatcttagtaggctcaaatgttcaggaagcacagggatggaaacctcttcccggacatgctgtcgtttcacagtcagatgtcttgagatatgttgcaatgcaagtgcccattgctgttcctgcagatgagaaataccagaaacataccctaagtccccagaatgctaatcctccaagtggacaagatgtccccaggccaaaaagccctgttttcctttctgttgctttcccagtagaagatgtagctaaaaaaagttcaggatctggtgacaaatgtgctccctttggaagttacggtattgctggggaggtaaccgtgactactgctcacaaacgtcgcaaagcagaaactgaaaactgatccagaaatgacgctgtctgggtcaacatttcagggaggagtctgccaccagtgtaatgtatcaataaacttcatgcaagctt

SEQ ID NO: 236 - DNA, 1088 bp, Homo sapiens
  ref <308>: DATABASE ACCESSION NUMBER: AB008913
  ref <309>: DATABASE ENTRY DATE: 2001-06-18
atgcatcaggacgggatcagcagcatgaaccagcttggggggctctttgtgaatggccggcccctgcctctggatacccggcagcagattgtgcggctagcagtcagtggaatgcggccctgtgacatctcacggatccttaaggtatctaatggctgtgtgagcaagatcctagggcgttactaccgcacaggtgtcttggagccaaagggcattgggggaagcaagccacggctggctacaccccctgtggtggctcgaattgcccagctgaagggtgagtgtccagccctctttgcctgggaaatccaacgccagctttgtgctgaagggctttgcacccaggacaagactcccagtgtctcctccatcaaccgagtcctgcgggcattacaggaggaccagggactaccgtgcacacggctcaggtcaccagctgttttggctccagctgtcctcactccccatagtggctctgagactccccggggtacccacccagggaccggccaccggaatcggactatcttctccccaagccaagcagaggcactggagaaagagttccagcgtgggcagtatcctgattcagtggcccgtggaaagctggctactgccacctctctgcctgaggacacggtgagggtctggttttccaacagaagagccaaatggcgtcggcaagagaagctcaagtgggaaatgcagctgccaggtgcttcccaggggctgactgtaccaagggttgccccaggaatcatctctgcacagcagtcccctggcagtgtgcccacagcagccctgcctgccctggaaccactgggtccctcctgctatcagctgtgctgggcaacagcaccagaaaggtgtctgagtgacaccccacctaaagcctgtctcaagccctgctgggactgtggctccttcctccttcctgtgattgctccctcctgtgtggacgttgcctggccctgcctcgatgcctctctggcgcatcacctgattggaggggctggtaaagcaacacccacccacttctcacactggccttaagaggcctccactcagcagtaataaaagctgttttt

SEQ ID NO: 237 - DNA, 1627 bp, Homo sapiens
  ref <308>: DATABASE ACCESSION NUMBER: AB011421
  ref <309>: DATABASE ENTRY DATE: 2001-06-18
ctccgctgctgtcgccaggagtcacttcacgagaagccaggtcacaaccgtcggcccttgtctggaaaagtaaaagtggatcctgccacgttcggagctccctggcgcctcgcccggctggagctagagaactcgtcctgtggcggcccccggcgtggggcgggacagcggccccctggagggggcagtcccgggagaacctgcggcggccggagcggtaaaaataagtgactaaagaagcagacctgggaatcacctaacatgtcgaggaggagatttgattgccgaagtatttcaggcctactaactacaactcctcaaattccaataaaaatggaaaactttaataatttctatatacttacatctaaagagctagggagaggaaaatttgctgtggttagacaatgtatatcaaaatctactggccaagaatatgctgcaaaatttctaaaaaagagaagaagaggacaggattgtcgggcagaaattttacacgagattgctgtgcttgaattggcaaagtcttgtccccgtgttattaatcttcatgaggtctatgaaaatacaagtgaaatcattttgatattggaatatgctgcaggtggagaaattttcagcctgtgtttacctgagttggctgaaatggtttctgaaaatgatgttatcagactcattaaacaaatacttgaaggagtttattatctacatcagaataacattgtacaccttgatttaaagccacagaatatattactgagcagcatataccctctcggggacattaaaatagtagattttggaatgtctcgaaaaatagggcatgcgtgtgaacttcgggaaatcatgggaacaccagaatatttagctccagaaatcctgaactatgatcccattaccacagcaacagatatgtggaatattggtataatagcatatatgttgttaactcacacatcaccatttgtgggagaagataatcaagaaacatacctcaatatttctcaagttaatgtagattattcggaagaaactttttcatcagtttcacagctggccacagactttattcagagccttttagtaaaaaatccagagaaaagaccaacagcagagatatgcctttctcattcttggctacagcagtgggactttgaaaacttgtttcaccctgaagaaacttccagttcctctcaaactcaggatcattctgtaaggtcctctgaagacaagacttctaaatcctcctgtaatggaacctgtggtgatagagaagacaaagagaatatcccagaggatagcagcatggtttccaaaagatttcgtttcgatgactcattacccaatccccatgaacttgtttcagatttgctctgttagcacttttttctttgactcatttggactgaatttgaaattttatatccactccagtgagattatgatttgtagcttcatatatgacatgtttatattgtaaatgcacttttccatggaataatttagggaagtgttttaatgttaaattactagttgctagcatgttatgatttcatatcctgagatagctctgcagataagaaaatatttaaatatatgacaaaaagtaaaattgtacatgtgaaag

SEQ ID NO: 238 - DNA, 496 bp, Homo sapiens
  ref <308>: DATABASE ACCESSION NUMBER: AI005063
  ref <309>: DATABASE ENTRY DATE: 2001-06-18
gccgagcagtcgggccgctgggcgccgccgcgggcgccgggagcgagctgggagggagccgcgcgcctttgtgcgcgcgccgaggagaatgcagttgaaactaattttgtggatagagaaactgttggaactgctttacaaagtattttaacagcccacctgaggatattgaccataaggactcatatctcattacaagaagcatcatggccgagccagactacatagaagatgacaatcctgaactcattaggcctcagaaactgatcaatcctgtaaaaacctcccggaaccatcaagatcttcacagagaacttcttatgaatcaaaaaaggggtcttgctcctcagaacaaaccagaattgcagaaggtgatggaaaaaagaaaacgagaccaagtaataaagcagaaggaagaagaagcacagaagaagaaatctgacttggaaatagagctattaaaacggcagcagaagttggagcagcttgaacttga

SEQ ID NO: 239 - DNA, 696 bp, Homo sapiens
  ref <308>: DATABASE ACCESSION NUMBER: J04130
  ref <309>: DATABASE ENTRY DATE: 2001-06-18
ttccccccccccccccccccccccgcccgagcacaggacacagctgggttctgaagcttctgagttctgcagcctcacctctgagaaaacctcttttccaccaataccatgaagctctgcgtgactgtcctgtctctcctcatgctagtagctgccttctgctctccagcgctctcagcaccaatgggctcagaccctcccaccgcctgctgcttttcttacaccgcgaggaagcttcctcgcaactttgtggtagattactatgagaccagcagcctctgctcccagccagctgtggtattccaaaccaaaagaagcaagcaagtctgtgctgatcccagtgaatcctgggtccaggagtacgtgtatgacctggaactgaactgagctgctcagagacaggaagtcttcagggaaggtcacctgagcccggatgcttctccatgagacacatctcctccatactcaggactcctctccgcagttcctgtcccttctcttaatttaatcttttttatgtgccgtgttattgtattaggtgtcatttccattatttatattagtttagccaaaggataagtgtcctatggggatggtccactgtcactgtttctctgctgttgcaaatacatggataacacatttgattctgtgtgttttccataataaaactttaaaataaaatgcagacagtta

SEQ ID NO: 240 - DNA, 440 bp, Homo sapiens
  Modified_base 1 ... 440: n = a,c,g, or t
  ref <308>: DATABASE ACCESSION NUMBER: R56094
  ref <309>: DATABASE ENTRY DATE: 2001-06-18
tttttttttttttttttttcacttctggagtcatttattgaaaaaaaagggtgaaaaccccaaaccagagtaaagtcaaggaacaaatatctgctgtgccagctgggtgcagggatagatccactgaagagtgggagaggaggtcagagccaccttcctcatcacccggttcgagcagantagatgagtggagagagccatgcaaaatcagcccctagnagantgcgagcggcacccggggaagatgcctgctgtacagtgaggagggttttagggttttgagcatccccatgagtccagtttttcacaggtagggggtacgagggtntacctcagaggtcacgggcagccttccacataggggtagcaggccactgatgttcattaccntggtcatttcgtttttccntcctttttccgtcatttgcntttaatttttt

SEQ ID NO: 241 - DNA, 408 bp, Homo sapiens
  ref <308>: DATABASE ACCESSION NUMBER: AI243123
  ref <309>: DATABASE ENTRY DATE: 2001-06-18
ttttttttttttttttgttttagaaagctcttttattttcagttctggctgtgttcaacatcttagcttacgtttttcatgttgtaatgatctgccgtacggacgatcacctctaagttagagagttctgtaatttggcttggattaaagatgcttggttagtgaaagctgctgctttttttatagtcaaaggactggttctgagagccttgttgcagatggctgaggtcaccgtcccaagggtgtatgtcgtgtttggcatccattgcatcatggcgaaggcatcttcagatgtgcaggtttcaggctttcatcggaaaatccagcacgttaaaaatgaactttgccacatgttgagcttggaggggtggccccagtgctgcagcagacattacttcaggacaacct

SEQ ID NO: 242 - DNA, 926 bp, Homo sapiens
  ref <308>: DATABASE ACCESSION NUMBER: AF091073
  ref <309>: DATABASE ENTRY DATE: 2001-06-18
ttcggcacgaggggaaacaacaggtgagcccaatccggaacttgtcagacgggcagaagtgccgagtgtgtctggcctggctggcctggcagaacccccacatgctcttcctggatgaacccaccaatcacctggatatcgagaccatcgacgccctggcagatgccatcaatgagtttgagggtggtatgatgctggtcagccatgacttcagactcattcagcaggttgcacaggaaatttgggtctgtgagaagcagacaatcaccaagtggcctggagacatcctggcttacaaggagcacctcaagtccaagctggtggatgaggagccccagctcaccaagagtacccacaacgtgtgagccctctacctgggttcgggtcaggagctccatctgggaactaacagctgctaacctgaccagccgctcaggacaggaccctggggctacactcctgcattgctgcaatactgctcccccagcctctcccctgcccctcaacctgccttagctgcactctcttacctacagctggacagtacctgtctgtttcctgtcctccttccagttacatctgtccatgtctggactcggctggccgttccctccagccccttgctggttatcttactctgagtgtgatgcagtcagaggcacctgcgggttagcccaggggcccaagccctggatttggcctgcggaggagcttaggatcctcgttttctgggttttggtgatgttggaggagtaccccccagcccaccgccccgattcctttttgcttctggtttggagctccggaccaggaccttcgtcctggtcagtttttaaataattatttagcagtgtaacttttaaacctgcgtgacatctacaaagcgcccaataaagaaagaggaagccaaaaaaaaaaaaaaaaaa

SEQ ID NO: 243 - DNA, 2044 bp, Homo sapiens
  ref <308>: DATABASE ACCESSION NUMBER: U47414
  ref <309>: DATABASE ENTRY DATE: 2001-06-18
ccggtcggatgccggaccgggggcaccgctgaggcggtgggtccccgacctgcgagacaggtttggaagcccccgctgcgcccagtccgtgcggaccgcgaggccgcgggcgggtggaggcgcgtctccggcacgatgaaggatttgggggcagagcacttggcaggtcatgaaggggtccaacttctcgggttgttgaacgtctacctggaacaagaagagagattccaacctcgagaaaaagggctgagtttgattgaggctaccccggagaatgataacactttgtgtccaggattgagaaatgccaaagttgaagatttaaggagtttagccaacttttttggatcttgcactgaaacttttgtcctggctgtcaatattttggacaggttcttggctcttatgaaggtgaaacctaaacatttgtcttgcattggagtctgttcttttttgctggctgctagaatagttgaagaagactgcaatattccatccactcatgatgtgatccggattagtcagtgtaaatgtactgcttctgacataaaacggatggaaaaaataatttcagaaaaattgcactatgaattggaagctactactgccttaaactttttgcacttataccatactattatactttgtcatacttcagaaaggaaagaaatactgagccttgataaactagaagctcagctgaaagcttgcaactgccgactcatcttttcaaaagcaaaaccatctgtattagccttgtgccttctcaatttggaagtggaaactttgaaatctgttgaattactggaaattctcttgctagttaaaaaacattccaagattaatgacactgagttcttctactggagagagttggtttctaaatgcctagccgagtattcttctcctgaatgttgcaaaccagatcttaagaagttggtttggatcgtttcaaggcgcacagcccagaacctccacaacagctactatagtgttcctgagctgccaacgatacctgaggggggttgttttgatgaaagtgaaagtgaggactcttgtgaagatatgagttgtggagaggagagtctcagcagctctcctcccagtgatcaagagtgcaccttctttttcaacttcaaagtggcacaaacactgtgctttccatcttagaaatctgattgttctgtcagaatttatatttacagggtttcaaagcaataaatgggggaataggtagtttcctggtttagcccccatctagtcaggaattaatatactggaatacctaccttctatttgttattcagatcagatctggcctattttcatatttatcctaagccatcaaatggggtagtgcctcttaaaccattaacagtactttagacattggcactttatttttctcgtagatctttagctactttggggaggagggaaggtgctgataccttcaatttgttacttttcaagatttttaaaaataactagtgtagcttatcttaaacattttataaaaccttcagatgtctttaagcagattggaagtatgcaagtgcttccttagcagggacagtggataatccttaatggtttatcatagatttcaccctccccccttctcagaagagtgagtatgctcttaaatgtcaaacacatttttgttgttttgttttttaaatgatcagtgtctatttgatgtgatgcagatcttataaatttgggaattataatattgacatttctgtgatttttatatatgtaatgtcttaattgagatttgtgttaaggcagaaataattaggctagggctcttagttttcattcctattgccccaagtattgtcaaactatggtattattttaatgttactttaaaaatccataatctgctagttttgcatgtacttatatgaaaacagtgcagtaagttgaaaactcagtatctatggaattgataaatgttgatctggtgtagtatattttatccgcattttcttatattaaaaaatgttctgcatgattacattttatttgcctttgt

SEQ ID NO: 244 - DNA, 390 bp, Homo sapiens
  ref <308>: DATABASE ACCESSION NUMBER: AI650643
  ref <309>: DATABASE ENTRY DATE: 2001-06-18
gcggccgcgcggcttccaggtggcgctgcatgcatggcggggtcaggagcctggtctccacacccgccagctggtctgcgggtgcagtgcctgtggcggtgccgtgcagccctcagggagtgcccgggagggggcgcccccagggccccccctagcacgtgcctacctcggccacgcccaggtcggagattttgagggtgccaccggtggtgagcagcaggttccccggcttgatgtccttgtgcacaatgccctggctatgcaggtactccaggccgtcaatcagctgacagaagtacccgtgggcctggcacacttggaaacgcttctccggcacgctgtccagcatttcctgcatgccacacacgcagtactccatcacctcgtgcc

SEQ ID NO: 245 - DNA, 498 bp, Homo sapiens
  ref <308>: DATABASE ACCESSION NUMBER: AI356773
  ref <309>: DATABASE ENTRY DATE: 2001-06-18
ggcagccccgcgcctagccagcgctgtttcaagccctacccgctcatcaccccctgctacatcaagaccaccacccggcagctcagctcgcccaatcactccccgtctcagtcccctaatcagagccccaggatcaagaggcggccggaaccctccctgagccgagggtccagaactgccctggcctccgtagccgccccggccaagaagcaccgggcagacggcggccttgcggccggcctgagccgctcggctgactggacggaggagctaggcgcccgcacgccccgggtgggaggctccgcgcacctgctggagcgcggggtggcgagtgacagcggcggtggggtgtccccagcactggccgccaaggcgtctggggcccccgcggctgcggatggcttccagaacgtggtcacaggtgagcgcgccctgctgctggcctccgggtctcaagtcgcctgtcagtcagggccttcccctgccacccgccctccc

SEQ ID NO: 246 - DNA, 511 bp, Homo sapiens
  Modified_base 1 ... 511: n = a,c,g, or t
  ref <308>: DATABASE ACCESSION NUMBER: R39960
  ref <309>: DATABASE ENTRY DATE: 2001-06-18
tttttttttattcaacagtttattttctcaagactacataaagaaatgaatgaccctttgttaaagtatcacttgaggtgacatttatgatcatattatcaccaattttataacaaagatttatgcattgaggttttataggttaataaccaaaaactgttctggacttggtatcctcattttagaagaggaattccagggacagtgggatgaacaggaaggtggnaaggatcatcacacacttttaggccttgagttgggcttgagtgggcactgactcaccgaggaaaggnccgggtctgtgggatgggagtggggcactgcagnaggggtgggtctcttgccaatgggtatggggccttgagacccaaaggatccactgatgttgcctccttctnctgatggccctccttggaatccctnccctgattctgcagttgccccaggagatgaggggcnttgctgnccagttaggccctttgtttaaacccatacgtttaggggtttggtt

SEQ ID NO: 247 - DNA, 1660 bp, Homo sapiens
  ref <308>: DATABASE ACCESSION NUMBER: AF070587
  ref <309>: DATABASE ENTRY DATE: 2001-06-18
cgggcgcgagccgccgcagccccgcgcccgctgctctctgcggagccgttttgtgccgcggcgcgggggaacggggacgcggggcggggggcgcggagccggcgggcgcagcctcagcatggacgtgacagtctcggagctcctggagctcttcctgcagagcccgctggtgacctgggtgaaaacttttggcccgtttggaagcggcagccaggacaacctgactatgtacatggatttagtggacggcatctttttgaaccaaattatgctgcaaatagatcccaggcccacaaatcaacgcatcaataagcacgtcaacaatgatgtgaaccttcgcattcagaatttgaccatcttggtgagaaacattaagacctactaccaggatagaccctttttccggtaactaaacttcttgcgggcagacacagcgtttgagttttcgcattggcttcaaacaaacccagtggaagtggacagtgaacaagacacccccgcaggaggcccgggcacggggtgtggctgccaggcctggccatggaaggccatcactgtgggctcttctgggagtggcactgacagccagcaaggagaatgggtgctggggcggagtggaagaaggtgagcttgaggccggagttcctaccccaggaggcaccgtcagcgtcccacttctgctcgtgtgatcccctggaggcacctgaatcaggcagtaaacatggagtgagaaacaccggagtagaagaccttgcaacagcacatgtgtgggcccagttcctagctgccccgggtggccaaggccacatcctgtacacacaggtctgggagtgtctgcatttcagcccttgaccgtgaacttgaccctctggaggtgtccatcttgatgtgatcctctgactgcaacctcatcctctgcctctcagagctgcctccccctgtggcttcttgccctgaggcatgggaggcgttggtgccaggagcttggggtttgagtcaggttggctcggggataagacccagcctttccacacattagtttgtgatgctgggtcatagtgcgtctgtttgctccctgtcaagggaccagtaacatgaggggtcagagaagggatcagaactctcgtgggcctccagtgtgtcgcaagtttttgctgttctgcttttcctcagctgctggtgggaatgcaaattgctgtgctgactttggaaaaactctccggcagtaaagcctaaagttccacatccacacaccgtactgtggcccagctgatttctctcctaagggtatcccggagtaacttctgcacatggatgcctgggacttcacagcccttctgcacacaataacagaaacctggaagccacccagatgcccatcagtgggagaagggatgaatacacgaagacacgatcacacaatggaatattatacagctgtccaaacacattaactgcagcataacttcagtgatgtaggtggactctggcaatatcataaatattagtaaaaatagcatgttcccaatgatgacttacagcactatgccttttaaaaataaagttaaaagcaactacaatgactgtactctctaggaaaatttacaggtgcaataaaactacataaaaaagcaaaaaaaaaaaaaaaaaaaaaaaaaaa

SEQ ID NO: 248 - DNA, 1639 bp, Homo sapiens
  ref <308>: DATABASE ACCESSION NUMBER: M17017
  ref <309>: DATABASE ENTRY DATE: 2001-06-18
acaaactttcagagacagcagagcacacaagcttctaggacaagagccaggaagaaaccaccggaaggaaccatctcactgtgtgtaaacatgacttccaagctggccgtggctctcttggcagccttcctgatttctgcagctctgtgtgaaggtgcagttttgccaaggagtgctaaagaacttagatgtcagtgcataaagacatactccaaacctttccaccccaaatttatcaaagaactgagagtgattgagagtggaccacactgcgccaacacagaaattattgtaaagctttctgatggaagagagctctgtctggaccccaaggaaaactgggtgcagagggttgtggagaagtttttgaagagggctgagaattcataaaaaaattcattctctgtggtatccaagaatcagtgaagatgccagtgaaacttcaagcaaatctacttcaacacttcatgtattgtgtgggtctgttgtagggttgccagatgcaatacaagattcctggttaaatttgaatttcagtaaacaatgaatagtttttcattgtaccatgaaatatccagaacatacttatatgtaaagtattatttatttgaatctacaaaaaacaacaaataatttttgaatataaggattttcctagatattgcacgggagaatatacaaatagcaaaattgggccaagggccaagagaatatccgaactttaatttcaggaattgaatgggtttgctagaatgtgatatttgaagcatcacataaaaatgatgggacaataaattttgccataaagtcaaatttagctggaaatcctggatttttttctgttaaatctggcaaccctagtctgctagccaggatccacaagtccttgttccactgtgccttggtttctcctttatttctaagtggaaaaagtattagccaccatcttacctcacagtgatgttgtgaggacatgtggaagcactttaagttttttcatcataacataaattattttcaagtgtaacttattaacctatttattatttatgtatttatttaagcatcaaatatttgtgcaagaatttggaaaaatagaagatgaatcattgattgaatagttataaagatgttatagtaaatttattttattttagatattaaatgatgttttattagataaatttcaatcagggtttttagattaaacaaacaaacaattgggtacccagttaaattttcatttcagataaacaacaaataattttttagtataagtacattattgtttatctgaaattttaattgaactaacaatcctagtttgatactcccagtcttgtcattgccagctgtgttggtagtgctgtgttgaattacggaataatgagttagaactattaaaacagccaaaactccacagtcaatattagtaatttcttgctggttgaaacttgtttattatgtacaaatagattcttataatattatttaaatgactgcatttttaaatacaaggctttatatttttaactttaagatgtttttatgtgctctccaaattttttttactgtttctgattgtatggaaatataaaagtaaatatgaaacatttaaaatataatttgttgtcaaagt

SEQ ID NO: 249 - DNA, 4404 bp, Homo sapiens
  ref <308>: DATABASE ACCESSION NUMBER: AB020663
  ref <309>: DATABASE ENTRY DATE: 2001-06-18
gtaaaagttgatgaggaacctcttaatcttgattggggtgaagatcacgacagtgccttagatgaagaggaagacgaagctgttggtttagtgatgaaaagtacagatgccagggaaaaagataaacaatcagatcagaaggcctcagaccctaacatgttattaacacctcaggaagaggatgatcctgaaggtgatactgaagttgatgtgattgctgaacaactaaaattcagagcttgtttaaagatccttatgactgaattaagaacattggctacaggttatgaagtagatggaggaaaactcagatttcaactctataactggcttgaaaaggaaattgctgccttgcatgagatatgtaatcatgaatcagttattaaagagtattccagtaagacatattccaaagtagagagtgatctgctggatcaggaagaaatggtagacaaaccagatattggttcctatgagcgccatcaaatagaaagaagaagattgcaggccaaacgagagcatgcagaaagacgaaagtcgtggttgcagaaaaaccaagatctcctgagagtatttctcagctactgtagccttcatggggcccaaggtggtggtttggcttcagtaaggatggaactcaaatttttgctacaagaatcacaacaggaaactacagtaaagcagctccagtctccactaccactgcctaccaccctacctctgctttcagcaagtattgcgtcaacaaaaacagtcatagctaatcctgtattgtacttaaataatcacatccatgatatactttatactattgttcagatgaaaacaccacctcatcccagtattgaagatgtgaaggtgcacacacttcattcactagcagcatcactttctgcatcaatttaccaagcattatgtgacagtcatagctacagtcaaacagaaggaaatcagtttacaggaatggcttatcaaggacttcttttaagtgatcgtagaagactaaggacagaaagcattgaagaacacgcaacaccaaattcatctcctgctcaatggcctggtgtgagctcacttattaatcttttgagttcagcccaagatgaagaccagccaaaactgaacattttgctatgtgaagctgttgttgctgtttacttaagtttattgatacatgctcttgccacaaattcctccagtgaattatttcggcttgcagcccacccattaaataatcgaatgtgggctgctgtttttggaggcggtgtaaaacttgttgtgaaacctcgaagacaatcagaaaatatttcagcacctcctgtcctttctgaagacatagataaacaccgtaggagatttaacatgagaatgctcgtccctggaaggcctgtaaaagatgctaccccaccaccggtgcctgcagaaagaccatcttacaaagaaaaatttattcctcccgaacttagtatgtgggattattttgttgcaaagccatttcttcctttgtctgatagtggtgttatatatgattctgatgaaagcattcatagtgatgaagaagatgatgcctttttttcagatacacaaatacaggagcaccaagatccaaattcctatagctgggctcttctacatttgacaatggttaaactagcacttcacaatgtcaagaatttctttcctattgctggactggaattctctgagctgcctgtaacatcaccattaggtattgctgtgattaaaaacttggagaactgggaacagatcttgcaagagaaaatggatcagtttgaaggtccaccccctaactatatcaacacatatccaactgacctttcagtgggagctggaccagctattcttcgaaataaagcaatgctagaacctgaaaataccccattcaagtcccgggattcttctgcatttccagtcaaacgactttggcatttccttgttaaacaagaggtccttcaagagacatttattagatatattttcactaagaaaagaaagcagagtgaggttgaagctgatctgggctatccaggtggaaaggcgaaagtcatccataaggaatctgatatgatcatggcattttctgttaataaggcaaattgtaatgaaattgttttggcttcaacacatgatgttcaagaacttgatgttacttctctactggcctgtcagtcatacatatggatcggagaagaatatgacagagaatccaaaagttcagatgatgttgattatcgtggttccactacaactctttatcaacccagtgcaacatcctattcagcaagtcaggtgcatccaccttcatctctgccatggctgggcactggacagactagcactggagctagtgtgcttatgaaaaggaatctacataatgttaagagaatgacttcacacccagtccatcaatactatcttacaggtgctcaggacggcagtgtacgaatgtttgaatggacgcggcctcagcaacttgtctgctttcgtcaagctggcaatgcaagagttactagattatattttaattcacaaggcaacaagtgtggtgttgcggatggagagggttttctgagtatctggcaagttaaccaaactgcatcaaatcctaaaccttatatgagttggcagtgccacagtaaagccacaagtgactttgcatttattacctcttcaagtctagttgccacatctggacactccaatgacaatagaaatgtttgcctctgggacacattaatatcacccggaaacagcctcattcatggtttcacgtgccacgatcatggtgccacggtactgcagtatgcacccaaacagcaactcctaatctcggggggtaggaaaggacacgtctgcatttttgacatcaggcaaaggcagctcattcacacgttccaggcccatgactcagctattaaggctctggccttggatccctatgaggaatattttaccacaggttcagcagaaggtaacataaaggtttggagattgacaggccatggcctaattcattcatttaaaagtgaatatgctaagcagtccatatttcgaaacattggggctggagtcatgcagattgacatcatccagggcaatcggctcttctcctgtggtgcagatggcacgctgaaaaccagggttttgcccaatgcttttaacatccctaacagaattcttgacattctataaagattggggttttatttttatatacatttcagttaaaaggcacactacagtcatcactaggcaattctgctttctaagcagttgtattgaaaacagagaatctctgtgtagatttgaatatgacccaagctgagtattatctaaacaggttggtggaatgaatgcgcatgtaccttattatgctgacatactaaaaaaaataaaacctagtattgtatgaaggatagctattctttacagcatttagcaaacctgattcagaaaacatttgagattagcaaattagtaacttgaaataatgaaaaggacgtttataccaaattaaggaagaaaatgttgctgatttgggtttttcttcctgttcttaccactgactgaagcatgcctgcagtctcctcctctgttgaatgaaggataatcataaggtgtttgttaggagcgctagaccacctggaaaactttcttagctgtggagcagtgcgcagtgaccagttctctgctgtgagaggccgtttccattctttcctgctgaatatttttcctgttagtgtttatactgagctagtactgtaacttgcaaatgagtgcaaatttaaatgcaatgttttactcacaatttgcacattcacattttttggactgctagtttttctatttaaatatttgccttcatgttaggaatgtactatgtgaacatgacatatttgtagttaaccaaacacaccttcttagtccagtttagtactttttcttttcgtgtattcaaggttaaacacccaaacatttaaggatatgttgaaactacaccaatagagcatttcatatcataattaaaatgaatgttaggcttcttgtggccagttaatagttgatgagattggtgacattatttattgccacagcctattgtataaactatgcagagttaaatatttgcttgtaaaatattagccaatgttgtcattattttgatgtatttccttggttatgaccaaaaatatgttgagatactgaaactaatgtctgtgtgtttaaatgtttaccagcaaattgtcttatcatgttaatgagaatgttcaatgcctgtgtggtaaatagtaaatacaatggcataaaagtaactttctctgaagatgtgatgttcaggctgtgaaatatatatgtaaaagaaaaataaatgttatttgttag

SEQ ID NO: 250 - DNA, 438 bp, Homo sapiens
  Modified_base 1 ... 438: n = a,c,g, or t
  ref <308>: DATABASE ACCESSION NUMBER: AI262941
  ref <309>: DATABASE ENTRY DATE: 2001-06-18
tttttttgtctgcgtgactattttttaataaaagtactgaagacccgttggcttttgtcgtagaggcagggcagtcacagcagcgtgggaacccgtgggaaggtggggcccccgggccagcgggagggtaacaaaatgctgtggggggctccgagacagcggctttcagccaggtcagccaggtgcatgtggaccccaagggtccccaaatccccaggacctcagaggtcccggcaccaccgccccgccctcggccctcttcccagggcgctgggctcaccagttcgctcctggcatcacagaggtgcccaataggggttcatttggcttccgccccccagacggtctcaggttctgggaagggcaggatggtgggcgggtcgccttcgaagcccaggctgcggngttgggcagcgaaaggagatacgggtctgggac

SEQ ID NO: 251 - DNA, 380 bp, Homo sapiens
  ref <308>: DATABASE ACCESSION NUMBER: AI262981
  ref <309>: DATABASE ENTRY DATE: 2001-06-18
gcggccgcggcccggacttggggacactgcgggcagcgcctggctctcaccaccgcccggctcgccatcgcggcggccggcagtctgcctgcatagtgcgggtgcctcggcagccccgcgcgcctctggccgcggcacccgaccaggagacggcggcagcggcgggagaacaagaggcagccctcgcctcaccccgcgccgggacccttccgcccctcaccccgctttcacctactcctccttcgtcccttccctccgctccccgcgccaagaccccaggccggagcgcaggggaggggagggaaggaagcggagtcctcgagccgcggaggacggccgcggcggagctaaggaacgtgcctcccgcgccgcgctcctca

SEQ ID NO: 252 - DNA, 436 bp, Homo sapiens
  ref <308>: DATABASE ACCESSION NUMBER: AA906175
  ref <309>: DATABASE ENTRY DATE: 2001-06-18
tttcagaaagtaagaggcctttattccctgaattcactgaatgaaagcacatcatcatggcagggtcctcatcatcaccatcagctccaacccagccaagacactcaacatagagatgcatgctagaatgaaagctgggagagcagagaaggaaaggaggaacattgaagccaatggatatccacaccctctccaacgaatctccacctcctctcactgagaaggttcaagaaggtttgtctctgagccttctcccagctataaatctaggcagactcctccctccccacacatccgctcctgctctctctcctccaggtgaccccagccataaggagccttgccctccttgctgccattctcctggtggccctgcaggctcgggcggacgactccaggcaattgctgatgaggctacagcccaggagcagcctgg

SEQ ID NO: 253 - DNA, 3427 bp, Homo sapiens
  ref <308>: DATABASE ACCESSION NUMBER: X75918
  ref <309>: DATABASE ENTRY DATE: 2001-06-18
gctcgcgcacggctccgcggtcccttttgcctgtccagccggccgcctgtccctgctccctccctccgtgagtgtccgggttcccttcgcccagctctcccacccctacccgaccccggcgcccgggctcccagagggaactgcacttcggcagagttgaatgaatgaagagagacgcggagaactcctaaggaggagattggacaggctggactccccattgcttttctaaaaatcttggaaactttgtccttcattgaattacgacactgtccacctttaatttcctcgaaaacgcctgtaactcggctgaagccatgccttgtgttcaggcgcagtatgggtcctcgcctcaaggagccagccccgcttctcagagctacagttaccactcttcgggagaatacagctccgatttcttaactccagagtttgtcaagtttagcatggacctcaccaacactgaaatcactgccaccacttctctccccagcttcagtacctttatggacaactacagcacaggctacgacgtcaagccaccttgcttgtaccaaatgcccctgtccggacagcagtcctccattaaggtagaagacattcagatgcacaactaccagcaacacagccacctgcccccccagtctgaggagatgatgccgcactccgggtcggtttactacaagccctcctcgcccccgacgcccaccaccccgggcttccaggtgcagcacagccccatgtgggacgacccgggatctctccacaacttccaccagaactacgtggccactacgcacatgatcgagcagaggaaaacgccagtctcccgcctctccctcttctcctttaagcaatcgccccctggcaccccggtgtctagttgccagatgcgcttcgacgggcccctgcacgtccccatgaacccggagcccgccggcagccaccacgtggtggacgggcagaccttcgctgtgcccaaccccattcgcaagcccgcgtccatgggcttcccgggcctgcagatcggccacgcgtctcagctgctcgacacgcaggtgccctcaccgccgtcgcggggctccccctccaacgaggggctgtgcgctgtgtgtggggacaacgcggcctgccaacactacggcgtgcgcacctgtgagggctgcaaaggcttctttaagcgcacagtgcaaaaaaatgcaaaatacgtgtgtttagcaaataaaaactgcccagtggacaagcgtcgccggaatcgctgtcagtactgccgatttcagaagtgcctggctgttgggatggtcaaagaagtggttcgcacagacagtttaaaaggccggagaggtcgtttgccctcgaaaccgaagagcccacaggagccctctcccccttcgcccccggtgagtctgatcagtgccctcgtcagggcccatgtcgactccaacccggctatgaccagcctggactattccaggttccaggcgaaccctgactatcaaatgagtggagatgacacccagcatatccagcaattctatgatctcctgactggctccatggagatcatccggggctgggcagagaagatccctggcttcgcagacctgcccaaagccgaccaagacctgctttttgaatcagctttcttagaactgtttgtccttcgattagcatacaggtccaacccagtggagggtaaactcatcttttgcaatggggtggtcttgcacaggttgcaatgcgttcgtggctttggggaatggattgattccattgttgaattctcctccaacttgcagaatatgaacatcgacatttctgccttctcctgcattgctgccctggctatggtcacagagagacacgggctcaaggaacccaagagagtggaagaactgcaaaacaagattgtaaattgtctcaaagaccacgtgactttcaacaatggggggttgaaccgccccaattatttgtccaaactgttggggaagctcccagaacttcgtaccctttgcacacaggggctacagcgcattttctacctgaaattggaagacttggtgccaccgccagcaataattgacaaacttttcctggacactttacctttctaagacctcctcccaagcacttcaaaggaactggaatgataatggaaactgtcaagagggggcaagtcacatgggcagagatagccgtgtgagcagtctcagctcaagctgccccccatttctgtaaccctcctagcccccttgatccctaaagaaaacaaacaaacaaacaaaaactgttgctatttcctaacctgcaggcagaacctgaaagggcattttggctccggggcatcctggatttagaacatggactacacacaatacagtggtataaactttttattctcagtttaaaaatcagtttgttgttcagaagaaagattgctataaggtataatgggaaatgtttggccatgcttggttgttgcagttcagacaaatgtaacacacacacacatacacacacacacacacacagagacacatcttaaggggacccacaagtattgccctttaacaagacttcaaagttttctgctgtaaagaaagctgtaatatatagtaaaactaaatgttgcgtgggtggcatgagttgaagaaggcaaaggcttgtaaatttacccaatgcagtttggctttttaaattattttgtgcctatttatgaataaatattacaaattctaaaagataagtgtgtttgcaaaaaaaaagaaaataaatacataaaaaagggacaagcatgttgattctaggttgaaaatgttataggcacttgctacttcagtaatgtctatattatataaatagtatttcagacactatgtagtctgttagattttataaagattggtagttatctgagcttaaacattttctcaattgtaaaataggtgggcacaagtattacacatcagaaaatcctgacaaaagggacacatagtgtttgtaacaccgtccaacattccttgtttgtaagtgttgtatgtaccgttgatgttgataaaaagaaagtttatatcttgattattttgttgtctaaagctaaacaaaacttgcatgcagcagcttttgactgtttccagagtgcttataatatacataactccctggaaataactgagcactttgaattttttttatgtctaaaattgtcagttaatttattattttgtttgagtaagaattttaatattgccatattctgtagtatttttctttgtatatttctagtatggcacatgatatgagtcactgcctttttttctatggtgtatgacagttagagatgctgattttttttctgataaattctttctttgagaaagacaattttaatgtttacaacaataaaccatgtaaatgaaaaaaaaaa

SEQ ID NO: 254 - DNA, 490 bp, Homo sapiens
  ref <308>: DATABASE ACCESSION NUMBER: AA868968
  ref <309>: DATABASE ENTRY DATE: 2001-06-18
tttagattttccatcaccctcaaatttatttttgcccctcagaggtggaggaggagagcactgaactgtaatgtttatacccagaagctggtttctggcttctgacctttatactgtgggggatgggacctactccctgtagtcagcgacagaaagtttcaggtatctgttgactttaggtccttgggcagcaaaaaactgtgctccctaaaaatgtgtttctagtttcagagcttctgctgagagtcagggttatgagggctggcggtgtactttgcttttccagaaccagcaagatttccctggagcgaagaaagcctaggttcatattccatactcagtagttatttgccacatgactgcaagctacctagtgaactcttgggaacttcactttcctcctgagtgaaataagataaatagctctctttccaggctcagtgaggactaacttagatactgtacaaagataatttgacatgtaatagac

SEQ ID NO: 255 - DNA, 483 bp, Homo sapiens
  ref <308>: DATABASE ACCESSION NUMBER: AI679625
  ref <309>: DATABASE ENTRY DATE: 2001-06-18
ggtctgtttcaggtcctgcatgatgactcagagttgtagattctaactctagctctccaggttcaatctctttgtctcagaggcagaataaatagcttgaaatggaaaaggcgatgggtaactttcctttaactgactctcccaagtcactatgtcccaaggccctcccttcatcagcaggaccatgatgcctggattctgcccacgaaaacatgaggccaacgcatacaccttccactcctctgacagccttcctagctcctgctgacaccattagaacatagctctagggttgagcctcacgtggcttcatcttttttctttctaaatgtttctaaccaaaaaagctttgccccttcttaagtaactctttttctcacttcctgcaaccacaacaattcccaattggcacggaccaggaccagtttttttccagttgccaagttaccttgaagtaccactggcatacttcaatgttgcaag

SEQ ID NO: 256 - DNA, 2303 bp, Homo sapiens
  ref <308>: DATABASE ACCESSION NUMBER: U68019
  ref <309>: DATABASE ENTRY DATE: 2001-06-18
cccggcgtcccgtcgagcccagccccgccgggggcgctcctcgccgcccgcacgccctccccagccatgtcgtccatcctgcctttcactcccccgatcgtgaagcgcctgctgggctggaagaagggcgagcagaacgggcaggaggagaaatggtgcgagaaggcggtcaagagcctggtcaagaaactcaagaagacggggcagctggacgagctggagaaggccatcaccacgcagaacgtcaacaccaagtgcatcaccatccccaggtccctggatggccggttgcaggtgtcccatcggaaggggctccctcatgtcatctactgccgcctgtggcgatggccagacctgcacagccaccacgagctgcgggccatggagctgtgtgagttcgccttcaatatgaagaaggacgaggtctgcgtgaatccctaccactaccagagagtagagacaccagttctacctcctgtgttggtgccacgccacacagagatcccggccgagttccccccactggacgactacagccattccatccccgaaaacactaacttccccgcaggcatcgagccccagagcaatattccagagaccccaccccctggctacctgagtgaagatggagaaaccagtgaccaccagatgaaccacagcatggacgcaggttctccaaacctatccccgaatccgatgtccccagcacataataacttggacctgcagccagttacctactgcgagccggccttctggtgctccatctcctactacgagctgaaccagcgcgtcggggagacattccacgcctcgcagccatccatgactgtggatggcttcaccgacccctccaattcggagcgcttctgcctagggctgctctccaatgtcaacaggaatgcagcagtggagctgacacggagacacatcggaagaggcgtgcggctctactacatcggaggggaggtcttcgcagagtgcctcagtgacagcgctatttttgtccagtctcccaactgtaaccagcgctatggctggcacccggccaccgtctgcaagatcccaccaggatgcaacctgaagatcttcaacaaccaggagttcgctgccctcctggcccagtcggtcaaccagggctttgaggctgtctaccagttgacccgaatgtgcaccatccgcatgagcttcgtcaaaggctggggagcggagtacaggagacagactgtgaccagtaccccctgctggattgagctgcacctgaatgggcctttgcagtggcttgacaaggtcctcacccagatgggctccccaagcatccgctgttccagtgtgtcttagagacatcaagtatggtaggggagggcaggcttggggaaaatggccatacaggaggtggagaaaattggaactctactcaacccattgttgtcaaggaagaagaaatctttctccctcaactgaaggggtgcacccacctgttttctgaaacacacgagcaaacccagaggtggatgttatgaacagctgtgtctgccaaacacatttaccctttggccccactttgaagggcaagaaatggcgtctgctctggtggcttaagtgagcagaacaggtagtattacaccaccggcaccctccccccagactctttttttgagtgacagctttctgggatgtcacagtccaaccagaaacgcccctctgtctaggactgcagtgtggagttcaccttggaagggcgttctaggtaggaagagcccgcacgatgcagacctcatgcccagctctctgacgcttgtgacagtgcctcttccagtgaacattcccagcccagccccgccccgttgtgagctggatagacttgggatggggagggagggagttttgtctgtctccctcccctctcagaacatactgattgggaggtgcgtgttcagcagaacctgcacacaggacagcgggaaaaatcgatgagcgccacctctttaaaaactcacttacgttgtcctttttcactttgaaaagttggaaggactgctgaggcccagtgcatatgcaatgtatagtgtctattatcacattaatctcaaagagattcgaatgacggtaagtgttctcatgaagcaggaggcccttgtcgtgggatggcatttggtctcaggcagcaccacactgggtgcgtctccagtcatctgtaagagcttgctccagattctgatgcatacggctatattggtttatgtagtcagttgcattcattaaatcaactttatcatatgctcaaaaaaaaaaaaaag

SEQ ID NO: 257 - DNA, 4267 bp, Homo sapiens
  ref <308>: DATABASE ACCESSION NUMBER: X04011
  ref <309>: DATABASE ENTRY DATE: 2001-06-18
cttcctctgccaccatcggggaactgggctgtgaatgaggggctctccatttttgctattctggtttggctggggttgaacgtcttcctctttgtctggtattaccgggtttatgatattccacctaagttcttttacacaagaaaacttcttgggtcagcactggcactggccagggcccctgcagcctgcctgaatttcaactgcatgctgattctcttgccagtctgtcgaaatctgctgtccttcctcaggggttccagtgcgtgctgctcaacaagagttcgaagacaactggacaggaatctcacctttcataaaatggtggcatggatgattgcacttcactctgcgattcacaccattgcacatctatttaatgtggaatggtgtgtgaatgcccgagtcaataattctgatccttattcagtagcactctctgaacttggagacaggcaaaatgaaagttatctcaattttgctcgaaagagaataaagaaccctgaaggaggcctgtacctggctgtgaccctgttggcaggcatcactggagttgtcatcacgctgtgcctcatattaattatcacttcctccaccaaaaccatccggaggtcttactttgaagtcttttggtacacacatcatctctttgtgatcttcttcattggccttgccatccatggagctgaacgaattgtacgtgggcagaccgcagagagtttggctgtgcataatataacagtttgtgaacaaaaaatctcagaatggggaaaaataaaggaatgcccaatccctcagtttgctggaaaccctcctatgacttggaaatggatagtgggtcccatgtttctgtatctctgtgagaggttggtgcggttttggcgatctcaacagaaggtggtcatcaccaaggtggtcactcaccctttcaaaaccatcgagctacagatgaagaagaaggggttcaaaatggaagtgggacaatacatttttgtcaagtgcccaaaggtgtccaagctggagtggcacccttttacactgacatccgcccctgaggaagacttctttagtatccatatccgcatcgttggggactggacagaggggctgttcaatgcttgtggctgtgataagcaggagtttcaagatgcgtggaaactacctaagatagcggttgatgggccctttggcactgccagtgaagatgtgttcagctatgaggtggtgatgttagtgggagcagggattggggtcacacccttcgcatccattctcaagtcagtctggtacaaatattgcaataacgccaccaatctgaagctcaaaaagatctacttctactggctgtgccgggacacacatgcctttgagtggtttgcagatctgctgcaactgctggagagccagatgcaggaaaggaacaatgccggcttcctcagctacaacatctacctcactggctgggatgagtctcaggccaatcactttgctgtgcaccatgatgaggagaaagatgtgatcacaggcctgaaacaaaagactttgtatggacggcccaactgggataatgaattcaagacaattgcaagtcaacaccctaataccagaataggagttttcctctgtggacctgaagccttggctgaaaccctgagtaaacaaagcatctccaactctgagtctggccctcggggagtgcatttcattttcaacaaggaaaacttctaacttgtctcttccatgaggaaataaatgtgggttgtgctgccaaatgctcaaataatgctaattgataatataaataccccctgcttaaaaatggacaaaaagaaactataatgtaatggttttcccttaaaggaatgtcaaagattgtttgatagtgataagttacatttatgtggagctctatggttttgagagcacttttacaaacattatttcatttttttcctctcagtaatgtcagtggaagttagggaaaagattcttggactcaattttagaatcaaaagggaaaggatcaaaaggttcagtaacttccctaagattatgaaactgtgaccagatctagcccatcttactccaggtttgatactctttccacaatactgagctgcctcagaatcctcaaaatcagtttttatattccccaaaagaagaaggaaaccaaggagtagctatatatttctactttgtgtcatttttgccatcattattatcatactgaaggaaattttccagatcattaggacataatacatgttgagagtgtctcaacacttattagtgacagtattgacatctgagcatactccagtttactaatacagcagggtaactgggccagatgttctttctacagaagaatattggattgattggagttaatgtaatactcatcatttaccactgtgcttggcagagagcggatactcaagtaagttttgttaaatgaatgaatgaatttagaaccacacaatgccaagatagaattaatttaaagccttaaacaaaatttatctaaagaaataacttctattactgtcatagaccaaaggaatctgattctccctagggtcaagaacaggctaaggatactaaccaataggattgcctgaagggttctgcacattcttatttgaagcatgaaaaaagagggttggaggtggagaattaacctcctgccatgactctggctcatctagtcctgctccttgtgctataaaataaatgcagactaatttcctgcccaaagtggtcttctccagctagcccttatgaatattgaacttaggaattgtgacaaatatgtatctgatatggtcatttgttttaaataacacccaccccttattttccgtaaatacacacacaaaatggatcgcatctgtgtgactaatggtttatttgtattatatcatcatcatcatcctaaaattaacaacccagaaacaaaaatctctatacagagatcaaattcacactcaatagtatgttctgaatatatgttcaagagagagtctctaaatcactgttagtgtggccaagagcagggttttctttttgttcttagaactgctcccatttctgggaactaaaaccagttttatttgccccaccccttggagccacaaatgtttagaactcttcaacttcggtaatgaggaagaaggagaaagagctgggggaagggcagaagactggtttaggaggaaaaggaaataaggagaaaagagaatgggagagtgagagaaaataaaaaaggcaaaagggagagagaggggaagggggtctcatattggtcattccctgccccagatttcttaaagtttgatatgtatagaatataattgaaggaggtatacacatactgatgttgttttgattatctatggtattgaatcttttaaaatctggtcacaaattttgatgctgagggggattattcaagggactaggatgaactaaataagaactcagttgttctttgtcatactactattcctttcgtctcccagaatcctcagggcactgagggtaggtctgacaaataaggcctgctgtgcgaatatagcctttctgaaatgtaccaggatggtttctgcttagagacacttaggtccagcctgttcacactgcacctcaggtatcaattcatctattcaacagatatttattgtgttattactatgagtcaggctctgtttattgtttcaattctttacaccaaagtatgaactggagagggtacctcagttataaggagtctgagaatattggccctttctaacctatgtgcataattaaaaccagcttcatttgttgctccgagagtgtttctccaaggttttctatcttcaaaaccaactaagttatgaaagtagagagatctgccctgtgttatccagttatgagataaaaaatgaatataagagtgcttgtcattataaaagtttcctttttatctctcaagccaccagctgccagccaccacgagccagctgccagcctagctttttttttttttttttttttagcacttagtatttagcatttattaacaggtactctaagaatgatgaagcattgtttttaatcttaagactatgaaggtttttcttagttcttctgcttttgcaattgtgtttgtgaaatttgaatacttgcaggctttgtatgtgaataattctagcgggggacctgggagataattctacggggaattcttaaaactgtgctcaactattaaaatgaatgagctttc

SEQ ID NO: 258 - DNA, 1203 bp, Homo sapiens
  ref <308>: DATABASE ACCESSION NUMBER: X69111
  ref <309>: DATABASE ENTRY DATE: 2001-06-18
gatctggggtgctgccaggaaaaagcaaattctggaagttaatggttttgagtgatttttaaatccttgctggcggagaggcccgcctctccccggtatcagcgcttcctcattctttgaatccgcggctccgcggtcttcggcgtcagaccagccggaggaagcctgtttgcaatttaagcgggctgtgaacgcccagggccggcgggggcggggccgaggcgggccattttgaataaagaggcgtgccttccaggcaggctctataagtgaccgccgcggcgagcgtgcgcgcgttgcaggtcactgtagcggacttcttttggttttctttctctttggggcacctctggactcactccccagcatgaaggcgctgagcccggtgcgcggctgctacgaggcggtgtgctgcctgtcggaacgcagtctggccatcgcccggggccgagggaagggcccggcagctgaggagccgctgagcttgctggacgacatgaaccactgctactcccgcctgcgggaactggtacccggagtcccgagaggcactcagcttagccaggtggaaatcctacagcgcgtcatcgactacattctcgacctgcaggtagtcctggccgagccagcccctggaccccctgatggcccccaccttcccatccagacagccgagctcgctccggaacttgtcatctccaacgacaaaaggagcttttgccactgactcggccgtgtcctgacacctccagaacgcaggtgctggcgcccgttctgcctgggaccccgggaacctctcctgccggaagccggacggcagggatgggccccaacttcgccctgcccacttgacttcaccaaatcccttcctggagactaaacctggtgctcaggagcgaaggactgtgaacttgtagcctgaagagccagagctagctctggccaccagctgggcgacgtcaccctgctcccaccccacccccaagttctaaggtcttttcagagcgtggaggtgtggaaggagtggctgctctccaaactatgccaaggcggcggcagagctggtcttctggtctccttggagaaaggttctgttgccctgatttatgaactctataatagagtatataggttttgtaccttttttacaggaaggtgactttctgtaacaatgcgatgtatattaaactttttataaaagtt

SEQ ID NO: 259 - DNA, 2861 bp, Homo sapiens
  ref <308>: DATABASE ACCESSION NUMBER: AF097021
  ref <309>: DATABASE ENTRY DATE: 2001-06-18
tcgagcggccgcccgggcaggtcggcctctcatttctcctagcccttctgttcttccttggccaagctgcaggggatttgggggatgtgggacctccaattcccagccccggcttcagctctttcccaggtgttgactccagctccagcttcagctccagctccaggtcgggctccagctccagccgcagcttaggcagcggaggttctgtgtcccagttgttttccaatttcaccggctccgtggatgaccgtgggacctgccagtgctctgtttccctgccagacaccacctttcccgtggacagagtggaacgcttggaattcacagctcatgttctttctcagaagtttgagaaagaactttccaaagtgagggaatatgtccaattaattagtttgtatgaaaagaaactgttaaacctaactgtccgaattgacatcatgggagaaggatacatttcttacactgaactggacttcgagctgataaggtagaagtgaaggagatggaaaaactggtcatacagctgaaggagagttttggtggaagctcagaaattgttgaccagctggaggtggagataagaaatatgactctcttggtagagaagcttgagacactagacaaaaacaatgtccttgccattcgccgagaaatcgtggctctgaagaccaagctgaaagagtgtgaggcctctaaagatcaaaacacccctgtcgtccaccctcctcccactccagggagctgtggtcatggtggtgtggtgaacatcagcaaaccgtctgtggttcagctcaactggagagggttttcttatctatatggtgcttggggtagggattactctccccagcatccaaacaaaggactgtattgggtggcgccattgaatacagatgggagactgttggagtattatatactgtacaacacactggatgatttgctattgtatataaatgctcgagagttgcggatcacctatggccaaggtagtggtacagcagtttacaacaacaacatgtacgtcaacatgtacacaccgggaatattgccagagttaacctgaccaccaacacgattgctgtgactcaaactctccctaatgctgcctataataaccgcttttcatatgctaatgttgcttggcaagcatattgactttgctgtggatgagaatggattgtgggttatttattcaactgaagccagcactggttaacatggtgattagtaaactcaatgacaccacacttcaggtgctaaacacttggtataccaagcagtataaaccatctgcttctaacgccttcatggtatgtggggttctgtatgccacccgtactatgaacaccagaacagaagagattttttactattatgacacaaacacagggaaagagggcaaactagacattgtaatgcataagatgcaggaaaaagtgcagagcattaactataacccttttgaccagaaactttatgtctataacgatggttaccttctgaattatgatctttctgtcttgcagaagccccagtaagctgtttaggagttagggtgaaagagaaaatgtttgttgaaaaaatagtcttctccacttacttagatatctgcagatatctaagtaagtggagaagactattttttcaacaaacattttctctttcaccctaactcctaaacagcttactggggcttctgcaagacagaaagatcataattcagaaggtaaccatcgttatagacataaagtttctggtcaaaagggttatagttaatgctctgcactttttcctgcatcttatgcattacaatgtctagtttgccctctttccctgtgtttgtgtcataatagtaaaaaatctcttctgtttggcgtatagggattctttgtacaggaaatattgcccaatgactagtcctcatccatgtagcaccactaattcttccatgcctggaagaaacctggggacttagttaggtagattaatatctggagctcctcgagggaccaaatctccaacttttttttcccctcactagcacctggaatgatgctttgtatgtggcagataagtaaatttggcatgcttatatattctacatctgtaaagtgctgagttttatggagagaggcctttttatgcattaaattgtacatggcaaataaatcccagaaggatctgtagatgaggcacctgctttttcttttctctcattgtccaccttactaaaagtcagtagaatcttctacctcataacttccttccaaaggcagctcagaagattagaaccagacttactaaccaattccaccccccaccaacccccttctactgcctactttaaaaaaattaatagttttctatggaactgatctaagattagaaaaattaattttctttaatttcattatgaacttttatttacatgactctaagactataagaaaatctgatggcagtgacaaagtgctagcatttattgttatctaataaagaccttggagcatatgtgcaacttatgagtgtatcagttgttgcatgtaatttttgcctttgtttaagcctggaacttgtaagaaaatgaaaatttaatttttttttctaggacgagctatagaaaagctattgagagtatctagttaatcagtgcagtagttggaaaccttgctggtgtatgtgatgtgcttctgtgcttttgaatgactttatcatctagtctttgtctatttttcctttgatgttcaagtcctagtctataggattggcagtttaaatgctttactcccccttttaaaataaatgattaaaatgtgcttcgaaaaaaaaaaaaaaaaaaaaaaaaaaaaaaa

SEQ ID NO: 260 - DNA, 2776 bp, Homo sapiens
  ref <308>: DATABASE ACCESSION NUMBER: AF044288
  ref <309>: DATABASE ENTRY DATE: 2001-06-18
gcggccgcgtcgaccggaggtgcctgtttacccgcgccggactcaccgccgccgccgccgcgggatccgagtgcgggcgcgggcgcgggcgctcccggcgagccacggtggtgctggctagagtgtttacgtttggacccaagcttaacttttccaatgtggaatcctgggccttcattggttccgatgtcataggaatctacgctagagggcttcctgtgtgccgggcactgtggtttttggaagaagctgaccgcctgaaaagaaattataaaacatgaaaatcgctttgaggtgaccaagtccagaggcccctaactcctcccaagctggatctggggtgtaagaactgtgacttcagatcatccaatggcagaccagagaatggacatttcttcaaccatcagtgatttcatgtccccgggccccaccgacctgctttccagctctcttggtaccagtggtgtggattgcaaccgcaaacggaaaggcagctccactgactaccaagaaagcatggacacagacaaagatgaccctcatggaaggttagaatatacagaacaccaaggaaggataaaaaatgcaagggaagctcacagtcagattgaaaagcggcgtcgggataaaatgaacagttttatagatgaattggcttctttggtaccaacatgcaacgcaatgtccaggaaattagataaacttactgtgctaaggatggctgttcagcacatgaaaacattaagaggtgccaccaatccatacacagaagcaaactacaaaccaacttttctatcagacgatgaattgaaacacctcattctcagggcagcagatggatttttgtttgtcgtaggatgtgaccgagggaagatactctttgtctcagagtctgtcttcaagatcctcaactacagccagaatgatctgattggtcagagtttgtttgactacctgcatcctaaagatattgccaaagtcaaggagcagctctcctcctctgacaccgcaccccgggagcggctcatagatgcaaaaactggacttccagttaaaacagatataacccctgggccatctcgattatgttctggagcacgacgttctttcttctgtaggatgaagtgtaacaggccttcagtaaaggttgaagacaaggacttcccctctacctgctcaaagaaaaaagcagatcgaaaaagcttctgcacaatccacagcacaggctatttgaaaagctggccacccacaaagatggggctggatgaagacaacgaaccagacaatgaggggtgtaacctcagctgcctcgtcgcaattggacgactgcattctcatgtagttccacaaccagtgaacggggaaatcagggtgaaatctatggaatatgtttctcggcacgcgatagatggaaagtttgtttttgtagaccagagggcaacagctattttggcatatttaccacaagaacttctaggcacatcgtgttatgaatattttcaccaagatgacataggacatcttgcagaatgtcataggcaagttttacagacgagagaaaaaattacaactaattgctataaatttaaaatcaaagatggttcttttatcacactacggagtcgatggttcagtttcatgaacccttggaccaaggaagtagaatatattgtctcaactaacactgttgttttagccaacgtcctggaaggcggggacccaaccttcccacagctcacagcatccccccacagcatggacagcatgctgccctctggagaaggtggcccaaagaggacccaccccactgttccagggattccagggggaacccgggctggggcaggaaaaataggccgaatgattgctgaggaaatcatggaaatccacaggataagagggtcatcgccttctagctgtggctccagcccattgaacatcacgagtacgcctccccctgatgcctcttctccaggaggcaagaagattttaaatggagggactccagacattccttccagtggcctactatcaggccaggctcaggagaacccaggttatccatattctgatagttcttctattcttggtgagaacccccacataggtatagacatgattgacaacgaccaaggatcaagtagtcccagtaatgatgaggcagcaatggctgtcatcatgagcctcttggaagcagatgctggactgggtggccctgttgactttagtgacttgccatggccgctgtaaacactacatgttgctttggcaacagctatagtatcaaagtgcattactggtggagttttacagtctgtgaagcttactggataaggagagaatagcttttatgtactgacttcataaaagccatctcagagccattgatacaagtcaatcttactatatgtaacttcagacaaagtggaactaagcctgctccagtgtttcctcatcattgattattgggctagctgtggatagcttgcattaattgtatattttggattctgtttgtgttgaattttttaatcattgtgcacagaagcatcattggtagcttttatatgcaaatggtcatttcagatgtatggtgtttttacactacaaagaagtcccccatgtggatatttcttatactaattgtatcataaagccgtttattcttccttgtaagaatcctttactataaatatgggttaaagtataatgtactagacagttaaatatttttaataaatgtttcccttgttctataaaaaaaaaaaaaaaaaaa

SEQ ID NO: 261 - DNA, 648 bp, Homo sapiens
  Modified_base 1 ... 648: n = a,c,g, or t
  ref <308>: DATABASE ACCESSION NUMBER: W84421
  ref <309>: DATABASE ENTRY DATE: 2001-06-18
ttttataaaagcttgtttttctttattagaatacttttttcaattctgatttgtcacaatttagattctttttctaagaataagcagaaatttacaaaatttaatttttatttatacattcatccgttcaatacacatttcaagaaagctgtattgcaccctttcagtggtagttacaggacaaagaaacaaaataatccaagagagagaccaacaaatgtatatttataacacagagtaataaacacaaataaatgtggagttatttaagcatgtaagatggtacatgctctaccaggtatgggggcttctctaagacacaagatcagattaaagtcttgaaagataatctggggttagtcaagcaggtagaagtgtgaagagcactttctgagcggaatctccatgtgccaagtctagttcaagagactggatagagattagcaatttggagaatgcaatattaagaaatggcaaaggtgagcctacagagattccaaagttgcatagtgaggtttgtgtttgagaaagtggccncaggcagcccccaaaagagggttaatagaaaggagctgaggtggaaatcaggcttgtgttcancagtgtggcanattgggagcatgggagatctgnctttnaaggncaagg

SEQ ID NO: 262 - DNA, 1969 bp, Homo sapiens
  ref <308>: DATABASE ACCESSION NUMBER: U69559
  ref <309>: DATABASE ENTRY DATE: 2001-06-18
ggcacgagggggagtgtgtgatctgtatgatggactttgtttatggggacccaattcgatttctgccgtgcatgcacatctatcacctggactgtatagatgactggttgatgagatccttcacgtgcccctcctgcatggagccagttgatgcagcactgctttcatcctatgagactaattgagccagggtctcttatctgacttcaagtgaaccaccattttggtggttttgatcttttgtcactgagcccaaagagccagggattaggaattaagatcgtgcacaaaagtttccttaaaattcctggatggctgcagatgttgggggaaaaagtacgtgatattttagaaacttagtgggaaaagtaggatggtatttttatgtaaagccttgacccaatgtttaaaaatataattgtatttagatcttgttattgctccagtacataggaattgtgtaaagtgttaacagcagctgtattgtttaaattgtgtgtattgaagattaggaaaaagatagtagttatttttcctaaatgaaataactttcttctcttccccttccccacccgaattcttttctgaagttgctggcatttgggtcaaggttttattaaaagctacattttataacactggcacacacaaaaaagtagttttaagcttgtttgcacagttctttttttccattggaaatggaattcattgccttaggtctttttaaatagtgtattattatcgttggggctggctctatgcttgaaaaccagtttatttataacctgttataagtgctatattctgtttgcagttaggaaatgcagaattcaaagtgatctcctagcttgtaagcaaactgagatgcactatcccttttctataaaaaataagttaatgtgtcaagaaaccaactctattaaggtggggtttaatattaccctttcctatgtgttttatctaattattttggttgttaatatggtgataatggaaagtcaagttaaattttaaatattaagaattctgatttattgagattgaattatgccaccacgtttatgtaaaaatgaaggtggcaccgtggtgagacctaatgagaaatagttactcagttgtaaaaattttgatttattctctttcttctgacctccttgcctcttgtcttgaaccatagcaaaaggatactgcatctctcattactgtagtgctgaggttattgaagttatacaaaacacatctcagtctctgtttcttggaaaggtatctattacatcctgctagctgactgacaaaactaagcagggagaataaagataattgtattttatgttttgcacacaaacgcagaatttgtataaccatatgacttcatagttgtgatctcaaaaaaagaaggaatttctcctttgtttcttgcagttaatgtaagaatactttaaatctctaagcttctgaagtgttagaggtagagatggtctagtaaagatgtagtagtaatgttttatccatttagcatgtgtttattttttcatatgtactcaaaggtgacttattggttcacctcagtgatattacagctaaaaaaatcattcattagcaaaaggaaaagtggtctcaacctaacatcagaagtgtttcttattattattttatattgagttgaatattgaactctaacagttttctacatacaaaacacagtgtcatgaaggttattcataattgcattatagaggaatgtagtatgtcataagtactttgtaaagatttgacattcaactgtagtatccatatgttgcttaaatttccttatgagccccatgatggaaagacttaaagatgaatttgagaaaaattgaaagaaattagattatcaggttctgttaaattgttacatgtatcttgcttaaatttctgtttattaatttatatccacccaagtacataaagcaaatttggaggaaac

SEQ ID NO: 263 - DNA, 540 bp, Homo sapiens
  ref <308>: DATABASE ACCESSION NUMBER: X52195
  ref <309>: DATABASE ENTRY DATE: 2001-06-18
tgcgttttgggggttcctggagtatcaatcatggatcaagaaactgtaggcaatgttgtcctgttggccatcgtcaccctcatcagcgtggtccagaatggattctttgcccataaagtggagcacgaaagcaggacccagaatgggaggagcttccagaggaccggaacacttgcctttgagcgggtctacactgccaaccagaactgtgtagatgcgtaccccactttcctcgctgtgctctggtctgcggggctactttgcagccaagttcctgctgcgtttgctggactgatgtacttgtttgtgcggcaaaagtactttgtcggttacctaggagagagaacgcagagcacccctggctacatatttgggaaacgcatcatactcttcctgttcctcatgtccgttgctggcatattcaactattacctcatcttctttttcggaagtgactttgaaaactacataaagacgatctccaccaccatctcccctctacttctcatttcctaactctctgctgaatatggggttggt

SEQ ID NO: 264 - DNA, 7042 bp, Homo sapiens
  ref <308>: DATABASE ACCESSION NUMBER: AF013263
  ref <309>: DATABASE ENTRY DATE: 2001-06-18
aagaagaggtagcgagtggacgtgactgctctatcccgggcaaaagggatagaaccagaggtggggagtctgggcagtcggcgacccgcgaagacttgaggtgccgcagcggcatccggagtagcgccgggctccctccggggtgcagccgccgtcgggggaagggcgccacaggccgggaagacctcctccctttgtgtccagtagtggggtccaccggagggcggcccgtgggccgggcctcaccgcggcgctccgggactgtggggtcaggctgcgttgggtggacgcccacctcgccaaccttcggaggtccctgggggtcttcgtgcgccccggggctgcagagatccaggggaggcgcctgtgaggcccggacctgccccggggcgaagggtatgtggcgagacagagccctgcacccctaattcccggtggaaaactcctgttgccgtttccctccaccggcctggagtctcccagtcttgtcccggcagtgccgccctccccactaagacctaggcgcaaaggcttggctcatggttgacagctcagagagagaaagatctgagggaagatggatgcaaaagctcgaaattgtttgcttcaacatagagaagctctggaaaaggacatcaagacatcctacatcatggatcacatgattagtgatggatttttaacaatatcagaagaggaaaaagtaagaaatgagcccactcaacagcaaagagcagctatgctgattaaaatgatacttaaaaaagataatgattcctacgtatcattctacaatgctctactacatgaaggatataaagatcttgctgcccttctccatgatggcattcctgttgtctcttcttccagtgtaaggacagtcctgtgtgaaggtggagtaccacagaggccagttgtttttgtcacaaggaagaagctggtgaatgcaattcagcagaagctctccaaattgaaaggtgaaccaggatgggtcaccatacatggaatggcaggctgtgggaagtctgtattagctgcagaagctgttagagatcattcccttttagaaggttgtttcccagggggagtgcattgggtttcagttgggaaacaagacaaatctgggcttctgatgaaactgcagaatctttgcacacggttggatcaggatgagagtttttcccagaggcttccacttaatattgaagaggctaaagaccgtctccgcattctgatgcttcgcaaacacccaaggtctctcttgatcttggatgatgtttgggactcttgggtgttgaaagcttttgacagtcagtgtcagattcttcttacaaccagagacaagagtgttacagattcagtaatgggtcctaaatatgtagtccctgtggagagttccttaggaaaggaaaaaggacttgaaattttatccctttttgttaatatgaagaaggcagatttgccagaacaagctcatagtattataaaagaatgtaaaggctctccccttgtagtatctttaattggtgcacttttacgtgattttcccaatcgctgggagtactacctcaaacagcttcagaataagcagtttaagagaataaggaaatcttcgtcttatgattatgaggctctagatgaagccatgtctataagtgttgaaatgctcagagaagacatcaaagattattacacagatctttccatccttcagaaggacgttaaggtgcctacaaaggtgttatgtattctctgggacatggaaactgaagaagttgaagacatactgcaggagtttgtaaataagtctcttttattctgtgatcggaatggaaagtcgtttcgttattatttacatgatcttcaagtagattttcttacagagaagaattgcagccagcttcaggatctacataagaagataatcactcagtttcagagatatcaccagccgcatactctttcaccagatcaggaagactgtatgtattggtacaactttctggcctatcacatggccagtgccaagatgcacaaggaactttgtgctttaatgttttccctggattggattaaagcaaaaacagaacttgtaggccctgctcatctgattcatgaatttgtggaatacagacatatactagatgaaaaggattgtgcagtcagtgagaattttcaggagtttttatctttaaatggacaccttcttggacgacagccatttcctaatattgtacaactgggtctctgtgagccggaaacttcagaagtttatcagcaagctaagctgcaggccaagcaggaggtcgataatggaatgctttacctggaatggataaacaaaaaaaacatcacgaatctttcccgcttagttgtccgcccccacacagatgctgtttaccatgcctgcttttctgaggatggtcagagaatagcttcttgtggagctgataaaaccttacaggtgttcaaagctgaaacaggagagaaacttctagaaatcaaggctcatgaggatgaagtgctttgttgtgcattctctacagatgacagatttatagcaacctgctcagtggataaaaaagtgaagatttggaattctatgactggggaactagtacacacctatgatgagcactcagagcaagtcaattgctgccatttcaccaacagtagtcatcatcttctcttagccactgggtcaagtgactgcttcctcaaactttgggatttgaatcaaaaagaatgtcgaaataccatgtttggtcatacaaattcagtcaatcactgcagattttcaccagatgataagcttttggctagttgttcagctgatggaaccttaaagctttgggatgcgacatcagcaaatgagaggaaaagcattaatgtgaaacagttcttcctaaatttggaggaccctcaagaggatatggaagtgatagtgaagtgttgttcgtggtctgctgatggtgcaaggataatggtggcagcaaaaaataaaatctttttgtggaatacagactcacgttcaaaggtggctgattgcagaggacatttaagttgggttcatggtgtgatgttttctcctgatggatcatcatttttgacatcttctgatgaccagacaatcaggctctgggagacaaagaaagtatgtaagaactctgctgtaatgttaaagcaagaagtagatgttgtgtttcaagaaaatgaagtgatggtccttgcagttgaccatataagacgtctgcaactcattaatggaagaacaggtcagattgattatctgactgaagctcaagttagctgctgttgcttaagtccacatcttcagtacattgcatttggagatgaaaatggagccattgagattttagaacttgtaaacaatagaatcttccagtccaggtttcagcacaagaaaactgtatggcacatccagttcacagccgatgagaagactcttatttcaagttctgatgatgctgaaattcaggtatggaattggcaattggacaaatgtatctttctacgaggccatcaggaaacagtgaaagactttagactcttgaaaaattcaagactgctttcttggtcatttgatggaacagtgaaggtatggaatattattactggaaataaagaaaaagactttgtctgtcaccagggtacagtactttcttgtgacatttctcacgatgctaccaagttttcatctacctctgctgacaagactgcaaagatctggagttttgatctccttttgccacttcatgaattgaggggccacaacggctgtgtgcgctgctctgccttctctgtggacagtaccctgctggcaacgggagatgacaatggagaaatcaggatatggaatgtctcaaacggtgagcttcttcatttgtgtgctccgctttcagaagaaggagctgctacccatggaggctgggtgactgacctttgcttttctccagatggcaaaatgcttatctctgctggaggatatattaagtggtggaacgttgtcactggggaatcctcacagaccttctacacaaatggaaccaatcttaagaaaatacacgtgtcccctgacttcaaaacatatgtgactgtggataatcttggtattttatatattttacagactttagaataaaatagttaagcattaatgtagttgaactttttaaatttttgaattggaaaaaaattctaatgaaaccctgatatcaactttttataaagctcttaattgttgtgcagtattgcattcattacaaaagtgtttgtggttggatgaataatattaatgtagctttttcccaaatgaacatacctttaatcttgtttttcatgatcatcattaacagtttgtccttaggatgcaaatgaaaatgtgaatacataccttgttgtactgttggtaaaattctgtcttgatgcattcaaaatggttgacataattaatgagaagaatttggaagaaattggtattttaatactgtctgtatttattactgttatgcaggctgtgcctcagggtagcagtggcctgctttttgaaccacacttaccccaagggggttttgttctcctaaatacaatcttagaggttttttgcactctttaaatttgctttaaaaatattgtgtctgtgtgcatagtctgcagcatttcctttaattgactcaataagtgagtcttggatttagcaggcccccccaccttttttttttgtttttggagacagagtcttgctttgttgccaggctggagtgcagtggcgcgatctcggctcaccacaatcgctgcctcctgggttcaagcaattctcctgcctcagcctcccgagtagctgggactacaggtgtgcgcacatgccaggctaatttttgtatttttagtagagacggggtttcaccatgttggccgggatggtctcgatctcttgacctcatgatctacccgccttggcctcccaaagtgctgagattacaggcgtgagccaccgtgcctggccaggccccttctcttttaatggagacagggtcttgcactatcacccaggctggagtgcagtggcataatcatacctcattgcagcctcagactcctgggttcaagcaatcctcctgcctcagcctcccaagtagctgagactgcaggcacgagccaccacacccagctaatttttaagttttcttgtagagacagggtctcactatgttgtctaggctggtcttgaactcttggcctcaagtaatcctcctgcctcagcctcccaaagtgttgggattgcagatatgagccactggcctggccttcagcagttctttttgtgaagtaaaacttgtatgttggaaagagtagattttattggtctacccttttctcactgtagctgctggcagccctgtgccatatctggactctagttgtcagtatctgagttggacactattcctgctccctcttgtttcttacatatcagacttcttacttgaatgaaacctgatctttcctaatcctcacttttttcttttttaaaaagcagtttctccactgctaaatgttagtcattgaggtggggccaattttaatcataagccttaataagatttttctaagaaatgtgaaatagaacaattttcatctaattccatttacttttagatgaatggcattgtgaatgccattcttttaatgaatttcaagagaattctctggttttctgtgtaattccagatgagtcactgtaactctagaagattaaccttccagccaacctattttcctttcccttgtctctctcatcctcttttccttccttctttcctttctcttcttttatctccaaggttaatcaggaaaaatagcttttgacaggggaaaaaactcaataactagctatttttgacctcctgatcaggaactttagttgaagcgtaaatctaaagaaacattttctctgaaatatattattaagggcaatggagataaattaatagtagatgtggttcccagaaaatataatcaaaattcaaagattttttttgtttctgtaactggaactaaatcaaatgattactagtgttaatagtagataacttgtttttattgttggtgcatattagtataactgtggggtaggtcggggagagggtaagggaatagatcactcagatgtattttagataagctatttagcctttgatggaatcataaatacagtgaatacaatcctttgcattgttaaggaggttttttgtttttaaatggtgggtcaaggagctagtttacaggcttactgtgatttaagcaaatgtgaaaagtgaaaccttaattttatcaaaagaaatttctgtaaatggtatgtctccttagaatacccaaatcataattttatttgtacacactgttaggggctcatctcatgtaggcagagtataaagtattaccttttggaattaaaagccactgactgttataaagtataacaacacacatcaggttttaaaaagccttgaatggcccttgtcttaaaaagaaattaggagccaggtgcggtggcacgtgcctgtagtcccagctccttgggaggctgagacaggaggattccttgagccctggagtttgagtccagcctgggtgacatagcaagaccctgtcttaaaagaaaaatgggaagaaagacaaggtaacatgaagaaagaagagatacctagtatgatggagctgcaaatttcatggcagttcatgcagtcggtcaagaggaggattttgttttgtagtttgcagatgagcatttctaaagcattttcccttgctgtatttttttgtattataaattacattggacttcatatatataatttttttttacattatatgtctcttgtatgttttgaaactcttgtatttatgatatagcttatatgatttttttgccttggtatacattttaaaatatgaatttaaaaaatttttgtaaaaataaaattcacaaaattgttttgaaaaacaaaaaaaaaaaaaa

SEQ ID NO: 265 - DNA, 3811 bp, Homo sapiens
  ref <308>: DATABASE ACCESSION NUMBER: AB014578
  ref <309>: DATABASE ENTRY DATE: 2001-06-18
cacacctcgtcttcagagtaacacaagagcactttatcagtattgccccattcctataatcaactatccacaactcgaaaatgaactattttgtaatatttattacctcaaacaactgtgtgatacactccggtttccagattggccaattaaagacccggttaagcttctaaaagatacccttgatgcctggaagaaagaagtagaaaagaagccacctatgatgtcaatagatgatgcttatgaagtgcttaatctgcctcaaggacagggaccgcatgatgagagcaagattaggaaagcttacttcagacttgcacaaaagtaccaccctgataagaatccagaagggagggacatgtttgaaaaagtaaataaagcatatgaatttttatgtaccaaatcagcaaaaatagtggatgggccagatccagagaatataattttaattctaaaaacacagagcatcctcttcaaccgtcataaagaagatttacagccttataaatatgcaggataccccatgcttattcggactataacaatggaaacttcagatgacctccttttctcaaaagaatcaccattgttgcctgcggctacagagctagctttccatactgtcaactgttcagccctcaatgctgaagagctcagaagagagaatggactagaggtgttacaagaggcatttagtcgctgtgtggctgtcttgactcgttctagtaaaccaagtgacatgtcagtacaggtgtgtggatacataagtaaatgctacagtgtggctgctcagtttgaggaatgccgagagaagatcacggaaatgcctagcatcatcaaggatctctgtcgggtactatattttggcaagagtattccccgcgtagctgctcttggggtagaatgtgtcagttcttttgctgtggatttctggctacagacacacctatttcaggctggaattttgtggtatctccttggttttctgtttaattatgactacacactagaagagagtggcattcagaaaagtgaagaaacaaaccagcaggaggtagcaaacagccttgccaaactgagtgtccatgctctgagtcgccttggagggtatttggctgaagaacaagcaactccagaaaatccaaccataaggaaaagcttagctggcatgctgacaccctatgttgctagaaaacttgctgtggctagtgtgactgagattttgaagatgcttaacagcaacacagaaagtccatatttgatatggaacaattctacaagagcagaattacttgaatttcttgaatcccaacaagaaaacatgattaaaaaaggtgattgtgacaaaacttatggatcagaatttgtctacagtgatcatgccaaagaacttattgtaggggagatttttgttagggtgtataatgaagttcctactttccaactggaggttccaaaagcatttgctgcaagtctcttggattatataggctcgcaggcccaatacttgcacacattcatggccatcacacacgcggcaaaagtggagtcagagcaacatggagatcgcttaccgagagtagaaatggctttggaggctctgagaaatgtcataaaatacaatccaggttctgagagtgaatgcattgggcactttaagttgatattttctcttctccgagttcatggagctggtcaagtgcagcagttggctttagaggttgtgaatatagtgacatctaaccaagactgtgtcaacaatattgctgaatcaatggttttgtccagtttattggctcttctacattcattgccatcaagtcgtcagcttgttctggaaactctttatgctttgacatcgagtacaaaaataatcaaagaagcaatggcaaagggtgctttgatctatttactggatatgttctgcaattcaacacatccacaggttcgagcccaaacagcagaactttttgccaaaatgacagcagataaactgataggtccaaaggttcgaattacgttaatgaaatttctaccaagcgttttcatggatgctatgagagacaatcctgaagctgctgtacatatttttgaaggaactcatgaaaatcctgagttaatttggaatgataattccagagataaagtgtccacaacagttagggaaatgatgctagagcactttaaaaatcagcaggacaaccctgaggcaaactggaagttgcctgaagattttgctgtggtgtttggagaagcagagggtgaacttgctgttggaggagtcttcttgaggatctttattgcacaaccagcctgggttctaagaaagcctagagaatttcttattgccctgttagaaaaattaactgagctcctagagaagaacaatcctcatggagaaactctggaaaccttgacaatggcaacagtgtgtctcttcagcgcacaacctcagctggcagatcaggtcccgccattgggccatcttcccaaagttatccaggcaatgaatcataggaacaatgccattcctaagagtgccattcgggttatccatgccttgtctgaaaatgagctgtgtgttcgagccatggcatctttagagaccattggcccactgatgaatggaatgaaaaagcgagcagatactgttggtctagcctgtgaagcaattaatcgaatgtttcagaaggagcagagtgaattagtagcacaagccctgaaagcagatttggttccatacctcttaaaattactcgaaggcattggccttgaaaacctggacagcccagcagccactaaggctcagattgttaaagctctcaaggcaatgactcgaagtttgcagtatggagaacaggtgaatgaaatcctgtgccgttcttcagtctggagtgccttcaaagatcagaaacatgatttgttcatttctgagtcacaaacagcaggatacctcacaggacctggagttgctggctaccttaccgcaggtacatctacatcagtcatgtctaacctgccacctcctgtagaccatgaggcaggcgaccttggctatcagacttgaaatattcacgagagacaataaacgctgaaaggccagtgccaagtccacattcctccagctgatacgttgaagcaaactcttactgcctttctcctggtttcatgacagtgttattcctttttctataaatatatttttaggaaaaaaagtcagtgatcctaattgtatcacattataagaaagcactctgtggatcaacataagtgggtacacaagaattttttttttcttggtgtatgtaagcacatttgttcctttatatctgtttacaaaactgtgaatcaaaaagacaaaactttcttcctagtttttgtaatttttttttttgaactagcatgactgtagggttgagctacagtcaacaaaaattgggctaagtcacttttccccaggaaagaatatttccctctcctgcatcaagtctgcgtggccatcctccccccaccatccaagactattaggttttgtccctgcacccttcactggcatcctcaatcattaaccttctgaaagctcacagtacacattagtatgtataactggctttaccaaattgaatgaaaaggagcttgtgcaaaaaaatttaaaaatggatgtcaagatgttatgtaaaagatgagtataattgtgaaatgttctatacactatcaaatatataaagctttctatattgaatgtacattatacagatcattcatatgtgtacataaaattttaaaaataaagggaattgactgctttgtt

SEQ ID NO: 266 - DNA, 863 bp, Homo sapiens
  ref <308>: DATABASE ACCESSION NUMBER: Y08136
  ref <309>: DATABASE ENTRY DATE: 2001-06-18
tagatatttttcaaaaatacagtgatgtcattgcaggacaattttatggacacactcacagagacagcattatggttctttcagataaaaaaggaagtccagtaaattctttgtttgtggctcctgctgttacaccagtgaagagtgttttagaaaaacagaccaacaatcctggtatcagactgtttcagtatgatcctcgtgattataaattattggatatgttgcagtattacttgaatctgacagaggcgaatctaaagggagagtccatctggaagctggagtatatcctgacccagacctacgacattgaagatttgcagccggaaagtttatatggattagctaaacaatttacaatcctagacagtaagcagtttataaaatactacaattacttctttgtgagttatgacagcagtgtaacatgtgataagacatgtaaggcctttcagatttgtgcaattatgaatcttgataatatttcctatgcagattgcctcaaacagctttatataaagcacaaatactagtatttcacagtttttgctaatagaaaatgctgattctgattctgagatcaatttgtgggaattttacataaatctttgttaattactgagtgggcaagtagacttcctgtctttgctttctttttttttttctttttgatgccttaatgtagatatctttatcattctgaattgtattatatatttaaagtgctcattaatagaatgatggatgtaaattggatgtaaatattcagtttatataattatatctaatttgtacccttgttgaaattgtcatttatacaataaagcgaattctttatctctaaaaaaaaaaaaaaaaaa

SEQ ID NO: 267 - DNA, 2241 bp, Homo sapiens
  ref <308>: DATABASE ACCESSION NUMBER: AF070569
  ref <309>: DATABASE ENTRY DATE: 2001-06-18
agtagaaggctcaaacaacccaaggttagttggtctttgtgtgacagtgggaagaagtggagagaacactctgtctccccgacttccttcttgaccctccttccgtatctttcattcttccccactggcctttccagatgaggtccaaaagtaagctcactcttcagggaaaagtgatactaaacccaggcgtgaggagtcatccttctgctcttacttttccctgcatttccttaggctggcccagactctagattcctgggcacttacctgtatctgagacccttagacctcctgtctcagtttctccacctgtgagatgggcagtcacacagatgagtgtgcatgagggaatcagaagcccatctgggttgactcagaacccgggctctccccctgctgtgggtggaaacaaaacaccttttcacagaagctgttgtccctcccccatccctgataccatcacccagaagctgggtggggaatgggaagctggaggagggggttagagttagaccaatgcgaggagctagtaagagctcgcctctccgtgacttccccccatgcaagggtggcccaaggcttcccctgatatccaaagcaggacagcagccccttggtgggattctaactgctgctactctgtttctttcctcactttgctttccaaggtggtatgtgatccccagctcaggcctgtgcagacaggaaattctcccctgcagcaagtaggggaggtgggttgtgggatgtgacctccttccagatatcaggcagtgagtgtaaacctgccacctccagccctgatccattctcacctagcggctacaggaagctgtgtctgttcgatttggtgggaggagatgtgcagggagctgtatcttgtcctccgcttgtgaaaaactcaaggatgtggagaagagtagaccgtggaaccctgctcttctgcagccaagctgaggggcaggatgcgtgtgggacagtggtagagaagcaggggataaactcataggctgcaacaaaggtgactctgtccctggacactgcctccgtactttctccttgcttcactggccacagcatctccctccagccctcgctatgtgcctctgccatcttcacccatcatggagcagaggtgaggagaggcagcctgggaatatggagaccagtgaaggaccaggcctggagagcacagggtcctacctgggcatccagcagaggagcccctaaaggccaggagcaccccaagaggagggagggcagccagcctccattgacggcgagcctccagccctctcctactttgatcaccatttctctccaggctttctgcctccgagatgtggcaccatagtgcggtgccctgtggcttcaccgccctacttccacctccgcccagcctgtaatgtttatataagcagcctcaaggaccaagaaccatctgcgaaaggacacacacaggaaattcataaaagaaatctgaatggataaaaccatgaaaaaaagtatgcttcattagtaattaaagaaaggcaaatagagctggaagcatttttcccttagcaaaccataacagaaaaaaataagacccaatattggcaaagagactactgaaaaaacattcccatacattgcgtgtgggagtatacatcggtgcaggcttcctggatgacagttgggtgatatgtgtcatgtggcctaaaagcctccatgtcatttgacctacgaattctatctttgggaatttatcctaagaaaatacttaaggatttagttagtgataagatgttcatcccagcattgcaatggagaaaaatgggaagcaatggtttggttgggaatttattccttttctgctgtaacgaaagtttgcaataggggattgcttaagtaaattattgtatctccatccagatggtggagtaccgcgcagacattaaaagtcatgtaaaagaacatctgactgaaagaaaaatgctccttgaatattaaaaggttgtaaaaatagtgcatgttatgtgatttcaattttgttttttaaaatatgggtgtatgcttgtatacgtagagcagataaaaaagacggaaggcatactaaaaaatgttgagtggttatctttgtatggtggaacaaagtcactgtaattttcatctttggtttttctgtaatttccaaattttccacattttgtatttcatataataaatataatttaagaaaaaaaaaaaaaaaaaaaa

SEQ ID NO: 268 - DNA, 3900 bp, Homo sapiens
  ref <308>: DATABASE ACCESSION NUMBER: AB018339
  ref <309>: DATABASE ENTRY DATE: 2001-06-18
agaaaatgcagttgggagctggacagatgacttgacccagttgagcctgctgaaggacaccctctctgcctatatcagtgctgatgatatctccattcttaatgaacgcgtagagcttctgcaaaggcagtgggaagaactatgccaccagctctccttaaggcggcagcaaataggtgaaagattgaatgaatgggcagtcttcagtgaaaagaacaaggaactctgtgagtggttgactcaaatggaaagcaaagtttctcagaatggagacattctcattgaagaaatgatagagaagctcaagaaggattatcaagaggaaattgctattgctcaagagaacaaaatacagctccaacaaatgggagaacgacttgctaaagccagccatgaaagcaaagcatctgagattgaatacaagctgggaaaggtcaacgaccggtggcagcatctcctggacctcattgcagccagggtgaagaagctgaaggagaccctggtagccgtgcagcagcttgataagaacatgagcagcctgaggacctggctcgctcacatcgagtcagagctggccaagccaatagtctacgattcctgtaactcggaagaaatacagagaaagcttaatgagcagcaggagcttcagagagacatagagaagcacagtacaggtgttgcatctgtcctcaacctgtgtgaagtcctgctgcacgactgtgacgcctgtgccactgatgccgagtgtgactctatacagcaggctacgagaaacctggaccggcggtggagaaacatttgtgctatgtccatggaaaggaggctgaaaatcgaagagacgtggcgattgtggcagaaatttctggatgactattcacgttttgaagattggctgaagtcttcagaaaggacagctgcttttcccagctcttctggggtgatctatacagttgccaaggaagaactaaagaaatttgaggctttccagcgacaggtccacgagtgcctgacgcagctggaactgatcaacaagcagtaccgccgcctggccagggagaaccgcactgattcagcatgtagcctcaaacagatggttcacgaaggcaaccagagatgggacaacctgcaaaagcgtgtcacctccatcttgcgcagactcaagcattttattggccagcgtgaggagtttgagactgcgcgggacagcattctggtctggctcacagagatggatctgcagctcactaatattgaacatttttctgagtgtgatgttcaagctaaaataaagcaactcaaggccttccagcaggaaatttcactgaaccacaataagattgagcagataattgcccaaggagaacagctgatagaaaagagtgagcccttggatgcagcgatcatcgaggaggaactagatgagctccgacggtactgccaggaggtcttcgggcgtgtggaaagataccataagaaactgatccgcctgcctctcccagacgatgagcacgacctctcagacagggagctggagctggaagactctgcagctctgtcggacctgcactggcacgaccgctctgcagacagcctgctttctccacagccttcctccaatctctccctctcgctcgctcagcccctccggagcgagcggtcaggacgagacaccccagctagtgtggactccatccccctggagtgggatcacgactatgacctcagtcgggacctggagtctgcaatgtccagagctctgccctctgaggatgaagaaggtcaggatgacaaagatttctacctccggggagctgttgccttatcaggggaccacagtgccctagagtcacagatccgacaactgggcaaagccctggatgatagccgctttcagatacagcaaaccgaaaatatcattcgcagcaaaactcccacggggccggagctagacaccagctacaaaggctacatgaaactgctgggcgaatgcagtagcagtatagactccgtgaagagactggagcacaaactgaaggaggaagaggagagccttcctggctttgttaacctgcatagtaccgaaacccaaacggctggtgtgattgaccgatgggagcttctccaggcccaggcattgagcaaggagttgaggatgaagcagaacctccagaagtggcagcagtttaactcagacttgaacagcatctgggcctggctgggggacacggaggaggagttggaacagctccagcgtctggaactcagcactgacatccagaccatcgagctccagatcaaaaagctcaaggagctccagaaagctgtggaccaccgcaaagccatcatcctctccatcaatctctgcagccctgagttcacccaggctgacagcaaggagagccgggacctgcaggatcgcttgtcgcagatgaatgggcgctgggaccgagtgtgctctctgctggaggagtggcggggcctgctgcaggatgccctgatgcagtgccagggtttccatgaaatgagccatggtttgcttcttatgctggagaacattgacagaaggaaaaatgaaattgtccctattgattctaaccttgatgcagagatacttcaggaccatcacaaacagcttatgcaaataaagcatgagctgttggaatcccaactcagagtagcctctttgcaagacatgtcttgccaactactggtgaatgctgaaggaacagactgtttagaagccaaagaaaaagtccatgttattggaaatcggctcaaacttctcttgaaggaggtcagtcgtcatatcaaggaactggagaagttattagacgtgtcaagtagtcagcaggatttgtcttcctggtcttctgctgatgaactggacacctcagggtctgtgagtcccacatcaggaaggagcaccccaaacagacagaaaacgccacgaggcaagtgtagtctctcacagcctggaccctctgtcagcagtccacatagcaggtccacaaaaggtggctccgattcctccctttctgagccagggccaggtcggtccggccgcggcttcctgttcagagtcctccgagcagctcttccccttcagcttctcctgctcctcctcatcgggcttgcctgccttgtaccaatgtcagaggaagactacagctgtgccctctccaacaactttgcccggtcattccaccccatgctcagatacacgaatggccctcctccactctgaactaagcagatgccatctgcagaagtgctggtagcataaggaggatcgggtcataagcaatcccaaactaccaacaagaggaccttgatcttggcgaaagccctcggtgtggcagctttagccctcctccagatcacatgtgtgcaaattatggcttcagaggtggaagataaacagtgacgggggaacaaacagacaacaagaaggtttggaagaaatctggtttgagactctgaaccttagcactaaggagattgagtaaggacctccaaagttccccggactcatgaattctgggcccttggcccattctgtgcacagccaaggacttcagtagaccatctgggcagctttcccatggtgctgctccaaccatcagataaatgaccctcccaagcaccatgtcagtgtcgtacaatctaccaaccaaccagtgctgaagagattttagaaccttgtaacatacaatttttaagagcttatatggcagcttcctttttaccttgttttcctttggggcatgatgttttaacctttgctttagaagcacaagctgtaaatctaaaaggcacttttttttagaggtataaagaaaaactagatgtaataaataagatcatggaaggctttatgtgaaaaaagttgaatgttatagt

SEQ ID NO: 269 - DNA, 1896 bp, Homo sapiens
  ref <308>: DATABASE ACCESSION NUMBER: U90916
  ref <309>: DATABASE ENTRY DATE: 2001-06-18
gtattttatataaacagaagagctaagttcctgaagactaagctagatagctgcagctatatgtaaattgtatatttttatgaacttttgaagcacacactcctgtttccctctgtgtagctttgtggggatttcatgtatatatgctgtctgaaagaatccagaggttggagtgccaatagaaaatgaaaacaaatgccttgtactacaggcagcctctgaaggtgaccagataactgtcttcactgtgaccagtcggagtccctgcttgcttgtgaagaaggggcttttgtaccttgttggagatgccacctcagaagttcacactgtgcaggaaaaaggttttattctctcctggcatacattagaatgtcagatgcctgcatccatgtggaccacgatgggcctctaaaaattggtgggcagggggtttgcttatgagttttctctggaaaccgattttactcctggatgtattgaatgccccttgagctttatgagatacgagtccacatggataaaatgttagagagtggagttctacagaggattccaggaagaggccatgtctgtgcagtcctagttccagacaggtgagaagctccaggaactactggctaccttgacaagctgggtaaatagttatcattctgggtaactggttgaaactctgacttttggacaagtaattcctggggttctgtctttggtagcatcaccagggatatttgggtgggacagacagaagacacacagctgcctgttctctcctgcccatcatgtttggcccactagatgaagctgtactcagcaatttagggaatgtaacccttctcagaactggccattttcaggggaagcttgggagagcaatagtatggtgagccccttagagatgagcgcctactccttcttggcgaatgctgccttcagatgcttaccaagtggtcactgcatctagtaagattatatttccagtacacttccttagggcagaaacaccatcctatcaggtttggtcagtcccttcttcatgaagggagtcatggggaattcctgaaaattttcttccttctgcagacagttggatgagtcccttagagaaggcatccagagacataactaaactgaatatcatcccatattgattttaggaattgactctaaaactctgtgcagaatcttgtgttgggattgtatcttgacattcctgttgtgttatttttcttaactggagtgtgtgctgcctttcaggtacaatttttgtgtaataaaagccagtgcattaagtttatatagactactttctatgcaagactgagatatggaatagataggaagagatatgtactgctgggtacatggacagtaagtgtgttttcagatggagtaccagcaccgaaaatgggttgagggaggatgggttgtatgtatgtttctgcccactaattttgagcagccatattatgaattaaatcgtcacagccaagtaataacccaagaatggtatgagtttcatgtgtaatagctcaaatggaataagcatgaatgctggagtggaccattatcctcaaatattctatgtcacttctcatttaaagactcttgttatgaactattagaaactttaggcaaaatcaaaagtatttgcggcaaaataaaggcctattctactcttatttaaagtgaaacactgtatacttgtttctctccaaagcgaaattaagtatttataatttcaattgcctcgataagtttccaagtcactgaaatctgctgaaggttttactgtattgttgcacaactttaagataatttttgtctcaatgtcaacttttttcactgaataaaaatttaactgggtcaagaaaaaaaaaaaaaaaaaaaaaaaaaaaa

SEQ ID NO: 270 - DNA, 1406 bp, Homo sapiens
  ref <308>: DATABASE ACCESSION NUMBER: X95239
  ref <309>: DATABASE ENTRY DATE: 2001-06-18
cggtgagaggggcgcgcagcagcagctcctcaacgccgcaacgcgccggcccaactgcaggaaggtctgtgctctggagccagggtaaatggttataaaattatacaccatggccctcctaaagacactctaggaaaaccatgtcatcctgatcttaaaacacctgcaagaaagagcacagtacttcaccattaataaagtagatatttcatcctgctcagaaaaccaacatttccagcaatggctttactaccggtgttgtttctggttactgtgctgcttccatctttacctgcagaaggaaaggatcccgcttttactgctttgttaaccacccagttgcaagtgcaaagggagattgtaaataaacacaatgaactaaggaaagcagtctctccacctgccagtaacatgctaaagatggaatggagcagagaggtaacaacgaatgcccaaaggtgggcaaacaagtgcactttacaacatagtgatccagaggaccgcaaaaccagtacaagatgtggtgagaatctctatatgtcaagtgaccctacttcctggtcttctgcaatccaaagctggtatgacgagatcctagattttgtctatggtgtaggaccaaagagtcccaatgcagttgttggacattatactcagcttgtttggtactcgacttaccaggtaggctgtggaattgcctactgtcccaatcaagatagtctaaaatactactatgtttgccaatattgtcctgctggtaataatatgaatagaaagaataccccgtaccaacaaggaacaccttgtgccggttgccctgatgactgtgacaaaggactatgcaccaatagttgccagtatcaagatctcctaagtaactgtgattccttgaagaatacagctggctgtgaacatgagttactcaaggaaaagtgcaaggctacttgcctatgtgagaacaaaatttactgatttacctagtgagcattgtgcaagactgcatggataagggctgcatcatttaattgcgacataccagtggaaattgtatgtatgttagtgacaaatttgatttcaaagagcaatgcatcttctcccccagatcatcacagaaatcactttcaggcaatgatttacaaaagtagcatagtagatgatgacaactgtgaactctgacataaatttagtgctttataacgaactgaatcaggttgaggattttgaaaactgtataaccataggatttaggtcactaggactttggatcaaaatggtgcattacgtatttcctgaaacatgctaaagaagaagactgtaacatcattgccattcctactacctgagtttttacttgcataaacaataaattcaaagctttacatctgcaaaaaaaaaaaaaaaaaaaa

SEQ ID NO: 271 - DNA, 1576 bp, Homo sapiens
  ref <308>: DATABASE ACCESSION NUMBER: AF052107
  ref <309>: DATABASE ENTRY DATE: 2001-06-18
gctgaagcaaaagatttgcatttaaggagagaaatacaccctgaaatttgagtttgaaagattagaacatagagggtctctacagtgtttttctgcaacaccaagtagtcaaatctatttatagaaactctgattacaacagaaattttaaaatgaaattttccacatcggtattttgtaggaaagctcttataatcaatgcttaagctgctttttgaggcttttcttgtacagaggttgcagccaattacattttaattggtaggctgctgaataatgtttttgtatgttttaaaataatatttattttaataggttttttaacattatgcaaatcccaataaagaactgacacgttccataggccattgactgggaaattttgtgaaacacagcctaaatacacagtttttacaccaactaatttgtcttgcctttaaaactgattataactcttctttaagtacaacttttataaagaaaaaatacaacactaagactgtatgttctgtaaattatagtgtgatgacccatgcagaaccgctgtctgaagcttactcagcgattcatagccatctccagccatgttttatcaaatcacacactaaaaataaatggaaatgctacagtgaaaaaccaaaagttacagagcaacataagtaaaatgactaggcagtttcttagtaacatgtttgaaatgggaaaggtgactgactgcctttcaccagagtcttagctgtttcacgttcactattttaggttaattttcttgggaaatcaatttgaatattcccccctgtccttttgcattaaaggacgaaaatatatgttgagagtttgacagactttttaaatatgcctctttcccaattttatgtatttttggttctgcgcacacagatttatcaatgaagtacatttgcctctggctttatcacaaggaaaaaggaatcaaacattgaacacaaatgtgttccaaaccagtcttgtccatcttgtcacttttatgtgactgctcctctgaaccagaaggggcacgatagaaggccataggaatgaaagtaaatcattcaggtgaagtgagaaattcttccatatacagagtgaaaatgtgtgatttcattcctgccttcctttaaacgttgtcttgatctctgcctagtagtagttgagccctcagtcgcccaaacatgaggagagacccaactccagcagccagaatttagtatttacatttgccttcccaagttgagaatagaatgtggtgttctgtgctttctgtttttattattccaaaatatttttttaaagaagtgttatttttcaacagattcataaattagttcctgatgtacggtaaattaaaactcccactgtgtcagtcaaactgagatgtgctcatttcataaccactcatttctagtctgtcagagctgcactggtggcttattgctggtttttaaaggtgtttttaacttacatgtaacatgtttaggacatgttttttttttctaatttgtgtgtctttacaactgattaaacagtagtttaaaaataaaaaaaaaaaaaaaaaaaa

SEQ ID NO: 272 - DNA, 800 bp, Homo sapiens
  Modified_base 1 ... 800: n = a,c,g, or t
  ref <308>: DATABASE ACCESSION NUMBER: AI656059
  ref <309>: DATABASE ENTRY DATE: 2001-06-18
ttttttttttttttcaatattatttatcaaaataaatttattaaaagtattcaaagaccacttcaaagggtagctgccttcaagacagatttttggcactcataacggacactgcagttttcaacaccatagcactcattctatttcacacatcatttttaacaatgcaaacacggaccatttcagttttagcattacatgagacaacagtactgatgatctgtggtcataagaacttcaatacccttgcacatagtaaacacttcactgttactgaatcctaaactaaaactactatgtggtaacatggatcgatttagggaaagatgtacaaccagctacctaaggccacataatcccagatctattgattttaaatgctttgggaccaacagtattacattgtctctttcatcatcttacattcctgcttttcagagtgagacaccacgttcagaccacctattcccttcttgcgttctgtacacagtgagggaagctgttctgataccagcttctcctagtcagttactggcttcctgattcactacccaactttgaatcaatagttctgagtgatggttcctgaacacccaggctgattccaagtcagtctttatgggaggtcacagtccttcccctcaggaaaaagaatgaaatgtccttcattcttgggctccttttacatttcatgtancatgaagctctggggtggatttgggctttttaaccaagtcctgggagaattctgacttcaagaaacgaggataagagttgtttctcatcaagcttataacctt

SEQ ID NO: 273 - DNA, 454 bp, Homo sapiens
  Modified_base 1 ... 454: n = a,c,g, or t
  ref <308>: DATABASE ACCESSION NUMBER: AI457525
  ref <309>: DATABASE ENTRY DATE: 2001-06-18
ctgaaatttgagggtttaggaattgacttttgtgtaaagaatgctacggtattataaagctgtggaagttttttccactagtttcaggtgtttttttttttgttgttgttgttgttattttgaactacttaccaaaattagaagttaaaatctaattagaaattaataagatactaaaattcatgacagttttttgtttgtttgtttgtttgttttttggtatttcttgatttgggcataaaaggcacacccattctctcatgcttggaagaagctgctattcctactggctatctaagaagaatggaattattaattntatttgacttattaattntaaacgagtttaatttgggatcatttagtaagtactcttttctttntgagctgtgatagattatagtctagtttaagttgctcctaagtagacagatgaagaaactagggaggcttt

SEQ ID NO: 274 - DNA, 5988 bp, Homo sapiens
  ref <308>: DATABASE ACCESSION NUMBER: D86959
  ref <309>: DATABASE ENTRY DATE: 2001-06-18
gggccttgcgccgcgggagcggacggcggcggaggagaccctaggctcgcggcccgaggcgggagggctcggcttctcgactgcccgcctccgaggccgccggccgcttctctctcccagagtggccgccgcccctggagactcgccgtgacacgggcctaagccgccgccgcgggagtcctgaccgctcggacccgtcggatcaggccgggtgggagcgagcttgcgggcaggtgccgctcccggagggtgggccggaggcgaggcgcccaccgcgcggctcgcgggccgggctcggcggaggggccgctcgcgcagcacccccaccgcgggccggagcccgggtcgccgccccgccttctcccgggaccgcccggccggagctgcgggggccgagggacgccgcgcccgccgccgccagccgggctcgcgcgggagagcagggaagagaaactttgccttttattgtttttagtccttaagtgcaaggaactctgtgttgggaggaaaaatgtccttcttcagtttccgtaagatcttcaagttggggagcgagaagaagaagaagcagtacgaacacgtgaagagggacctgaaccccgaagacttttgggagattataggagaactgggcgacggagcctttgggaaagtgtacaaggcccagaataaagagaccagtgttttagctgctgcaaaagtgattgacactaaatctgaagaagaacttgaagattacatggtagagattgacatattagcatcttgtgatcacccaaatatagtcaagcttctagatgccttctattatgagaacaatctttggatcctcattgaattttgtgcaggtggagcagtagatgctgtgatgcttgaacttgagagaccattaactgagtcccaaatacaagtagtttgcaagcagactttagatgcattgaactacttacatgataataagatcatccacagagatctgaaggctggcaacattctctttaccttagatggagatatcaaattggcggattttggagtatcagctaaaaacacgaggacaattcaaagaagagattcctttattggtacaccatattggatggctcctgaagtagtcatgtgtgaaacatctaaggacagaccctatgactacaaagctgatgtttggtccctgggtatcactttaatagaaatggctgagatagaaccacctcatcatgaattaaatccaatgcgagtgctgctaaaaatagcaaaatctgagccacctacattagcacagccatccagatggtcttcaaattttaaggactttctaaagaaatgcttagaaaagaatgtggatgccaggtggactacatctcagctgctgcagcatccctttgttactgttgattccaacaaacccatccgagaattgattgcagaggcgaaggctgaagtaacagaagaagttgaagatggcaaagaggaagatgaagaggaggaaacagaaaattctctgccaatacctgcaagtaagcgtgcatcttctgaccttagtatcgccagctctgaagaagataaactttcacaaaatgcttgtattttggagtctgtctcagaaaaaacagaacgtagtaactctgaagataaactcaacagcaaaattcttaatgaaaaacccaccactgatgaacctgaaaaggctgtggaggatattaatgaacatattaccgatgctcagttagaagcaatgactgaactccatgacagaacagcagtaatcaaggagaatgaaagagagaagaggcccaagcttgaaaatctgcctgacacagaagaccaagaaactgtggacattaattcagtcagtgaaggaaaagagaataatataatgataaccttagaaacaaatattgaacataatctaaaatctgaggaagaaaaggatcaggaaaagcaacagatgtttgaaaataagcttataaaatctgaagaaattaaagatactattttgcaaacagtagatttagtttctcaagagactggagaaaaagaggcaaatattcaggcagttgatagtgaagttgggcttacaaaggaagacacccaagagaaattgggggaagacgacaaaactcaaaaagatgtgatcagcaatacaagtgatgtgataggaacatgtgaggcagcagatgtggctcagaaagtggatgaagacagtgctgaggatacgcagagtaatgatgggaaagaagtggtcgaagtaggccagaaattaattaataagcccatggtgggtcctgaggctggtggtactaaggaagttcctattaaagaaatagttgaaatgaatgaaatagaagaaggtaaaaataaggaacaagcaataaacagttcagagaacataatggacatcaatgaggaaccaggaacaactgaaggtgaagaaatcactgagtcaagtagcactgaagaaatggaggtcagaagtgtggtggctgatactgaccaaaaggctttaggaagtgaagttcaggatgcttctaaagtcactactcagatagataaagagaaaaaagaaattccagtgtcaattaaaaaagagcctgaagttactgtagtttcacagcccactgaacctcagcctgttctaatacccagtattaatatcaactctgacagtggagaaaataaagaagaaataggttctttatcaaaaactgaaactattctgccaccagaatctgagaatccaaaggaaaatgataatgattcaggcactggttccactgctgatactagcagtattgacttgaatttatccatctctagctttctaagtaaaactaaagacagtggatcgatatctttacaagaaacaagaagacaaaagaaaacattgaagaaaacacgcaaatttattgttgatggtgtagaagtgagtgtaacaacatcaaagatagttacagatagtgattccaaaactgaagaattgcggtttcttagacgtcaggaacttcgggaattaagatttcttcagaaagaagagcaaagagcccaacaacagctcaatagcaaactacagcaacaacgagaacaaattttccggcgctttgagcaggaaatgatgagtaaaaagcgacaatatgaccaggaaattgagaatctagaaaaacagcagaaacagactatcgaacgcctggaacaagagcacacaaatcgcttgcgagatgaagccaaacgcatcaaaggagaacaagagaaagagttgtccaaatttcagaatatgctgaagaaccgaaagaaggaggaacaagagtttgttcagaaacaacagcaagaattagatggctctctgaaaaagatcatccagcagcagaaggcagagttagctaatattgagagagagtgcctgaataacaagcaacagctcatgagagctcgagaagctgcaatttgggagctcgaagaacgacacttacaagaaaaacaccagctgctcaaacagcagcttaaagatcagtatttcatgcaaagacatcagctacttaagcgccacgagaaggaaacagagcaaatgcagcgttacaatcaaagacttattgaggaattgaaaaacagacagactcaagaaagagcaagactgcccaagattcagcgcagtgaagccaagactcgaatggccatgtttaagaagagtttgagaattaactcaacagccacaccagatcaggaccgtgataaaattaaacagtttgctgcacaagaagaaaagaggcagaaaaatgagagaatggctcagcatcagaaacatgagaatcaaatgcgagatcttcagttgcagtgtgaagccaatgtccgcgaactgcatcagctgcagaatgaaaaatgccacttgttggttgagcatgagactcagaaactgaaggagttagatgaggaacatacaagaattaaaggagtggagagagaaattgagacctaggaaaaagacactggaagaagagtttgccaggaaactacaggaacaggaagtattctttaaaatgactggggagtctgaatgccttaacccatcaacacagagccggatttccaaattttatcctattcccagcttgcattccaccggatcataacaaagggaagcattctgtgcgtgggtttggctctttcagtatgtcattctgttctcatcttctgccacagtctctcagatagctcatgaagacaatcacctgcctcaccttctaggtgttttccttttttgttttttttgttttgttttgtttttaagcaaagatgaagggaaaacgaactaagacagacgctaggccatgttggcaaagtagcatcttggtgactaaggtgactttgtatattcatcttaaaaattatgttctttagacactgctacctgaaaactgttggagaaataatgtttaaagttatttaagaaaaactgttacatcactaagtattaataaattcttcttacctgacgtaacttctcaatgcctaaattctgtagttgaagctctgctgcagagagttgggataattttcttttggtggatcagctctcataaaaaagctatgatttgctcaaatatgctgttgactcagtaaatgaatatatttttttttttaaataggaacaacctcttttaaaagagaaaaattatttcagtgatttgtcaaaacgaattacctcttttggcatgagctaataattgagggtgctaattttcttaagatagtgcctaaaacactaaatttcagtcaagtcgtaagtaggattttctttttgatcaacagggacaaaaacatctttagaattaaaaacatggttgttttggaatttttgcttctcttaccgtttgatagaaattttcatcctaaaatacatgtacaaagtttggaaagatgaaaaaaagaggtagcttttagattgcaaattggaaatgtaaaactcatgaaatttaagcaatataggtttagctatctgtgtttattttctaaaataatacctgagctggttaaatgatttctctccatcttagctaattctgtttaaaactctgtcagaggcctgcaggctgtgagttatatttataaatatatcttcagaaattaatcttaaaagaggcattagttcagaatacttttttaaaagtttaaattaaatatttaggcacgtcagaaattacttttccttattttgaaatgaggctacttatgtcttggttttattttgttccatgtttaaatcattcagtttgatttgagtgggaaaagcctgaagcctttatcatgtggttgctggtgtgtgtaattattaatgaaatgttcactcctagtcccttatgaggcttagaatttcaaccacgtgtcaggtcagacagtattataaactgtactttgctgtctgagacagcacatttgtgaatgatgcttgctgcctgccattttcaacctattctctcttaagagtgctaggtaccaaattgtgaaagtttgttttcagttatattacttttgaggctggtgaaaaatttaaatgtaactttgtgggaacactgattcatatttagaaaatgtaaatgtctgtagcactttcttgcagttaatttgaaaactttggatgctgaaccttgtttgtcagtgatttagatgatttaaaaatgcatgtgtgatttgaattttataattgttttgacaagcataatttacttggacaacttcgtaggtagccttaacttctggccaagtttgttttttatataaatatatatacatatatacatattatgtatggttgtaaattcatacacttatcacatgaatgtgttactgtatacaaaactcttaatgctttattctcaaatgctgggttgaaaaatgttttgaaagccttttaaaatatatatctttataaagtaatattcaggatgatgataaaaattgtttatattgttatgataaaaatgacagtataatgtt

SEQ ID NO: 275 - DNA, 3280 bp, Homo sapiens
  ref <308>: DATABASE ACCESSION NUMBER: D80012
  ref <309>: DATABASE ENTRY DATE: 2001-06-18
gcgtgagcagccggaggatcgcggagtcccaatgaaacgggcagccatggccctccacagcccgcagtatatttttggagattttagccctgatgaattcaatcaattctttgtgactcctcgatcttcagttgagcttcctccatacagtggaacagttctgtgtggcacacaggctgtggataaactacctgatggacaagaatatcagagaattgagtttggtgtcgatgaagtcattgaacccagtgacactttgccgagaacccccagctacagtatttcaagcacactgaaccctcaggcccctgaatttattctcggttgtacagcttccaaaataacccctgatggtatcactaaagaagcaagctatggctccatcgactgccagtacccaggctctgccctcgctttggatggaagttctaatgtggaggcggaagttttggaaaatgatggtgtctcaggtggtcttggacaaagggagcgtaaaaagaagaaaaagcggccacctggatattacagctatttgaaagatggtggcgatgatagtatctccacagaagccctggtcaatggccatgccaattcagcagtcccgaacagtgtcagtgcagaggatgcagaatttatgggtgacatgcccccgtcagttacgcccaggacttgtaacagcccccagaactccacagactctgtcagtgacattgtgcctgacagtcctttccccggagcactcggcagtgacaccaggactgcagggcagccagaggggggccccggggctgattttggtcagtcctgcttccctgcagaggctggcagagacaccctgtcaaggacagctggggctcagccctgcgttggtaccgatactactgaaaaccttggagttgctaatggacaaatacttgaatcctcgggtgagggcacagctaccaacggggtggagttgcacaccacggaaagcatagacttggacccaaccaaacccgagagtgcatcacctcctgctgacggcacgggctctgcatcaggcacccttcctgtcagccagcccaagtcctgggccagcctctttcatgattctaagccctcttcctcctcgccggtggcctatgtggaaactaagtattcccctcccgccatatctcccctggtttctgaaaagcaggttgaagtcaaagaagggcttgttccggtttcagaggatcctgtagccataaagattgcagagttgctggagaatgtaaccctaatccataaaccagtgtcgttgcaaccccgtgggctgatcaataaagggaactggtgctacattaatgctacactgcaggcattggttgcttgcccgccgatgtaccacctgatgaagttcattcctctgtattccaaagtgcaaaggccttgtacgtcaacacccatgatagacagctttgttcggctaatgaatgagttcactaatatgccagtacctccaaaaccccgacaagctcttggagataaaatcgtgagggatattcgccctggagctgcctttgagcccacatatatttacagactcctgacagttaacaagtcaagcctgtctgaaaagggtcgacaagaagatgctgaggaatacttaggcttcattctaaatggacttcatgaggaaatgttgaacctaaagaagcttctctcaccaagtaatgaaaaacttacgatttccaacggccccaaaaaccactcggtcaatgaagaagagcaggaagaacaaggtgaaggaagcgaggatgaatgggaacaagtgggcccccggaacaagacttccgtcacccgccaggcggattttgttcagactccaatcaccggcatttttggtggacacatcaggtctgtggtttaccagcagagttcaaaagaatctgccactttgcagccatttttcacgttgcagttggatatccagtcagacaagatacgcacagtccaggatgcactggagagcttggtggcaagagaatctgtccaaggttataccacaaaaaccaaacaagaggttgagataagtcgaagagtgactctggaaaaactccctcctgtcctcgtgctgcacctgaaacgattcgtttatgagaagactggtgggtgccagaagcttatcaaaaatattgaatatcctgtggacttggaaattagtaaagaactgctttctccaggggttaaaaataagaattttaaatgccaccgaacctatcggctctttgcagtggtctaccatcacggcaacagtgcgacgggcggccattacactacagacgtcttccagatcggtctgaatggctggctgcgcatcgatgaccagacagtcaaggtgatcaaccagtaccaggtggtgaaaccaactgctgaacgcacagcctacctcctgtattaccgccgagtggacctgctgtaaaccctgtgtgcgctgtgtgtgcgcccagtgcccgcttcgtaggacaccacctcacactcacttcccgcctctctttagtggctctttagagagaaactctttctccctttgcaaaaatgggctagaatgaaaaggagatgccttggggttcgtgcacaacacagcttctgttgactctaacttccaaatcaaaatcatttggttgaaacagactgttgcttgattttagaaaatacacaaaaacccatatttctgaaataatgctgattcctgagataagaaagtggatttgatccccagtctcattgcttagtagaataaatcctgcaccagcaacaacacttgtaaatttgtgaaaatgaattttatctttccttaaaaaagaaattttttaatccatcacacttttcttccctaccctttagtttttgataaatgataaaaatgagccagttatcaaagaagaactagttcttacttcaaaagaaaaataaacataaaaaataagttgctggttcctaacaggaaaaattttaataattgtactgagagaaactgcttacgtacacattgcagatcaaatatttggagttaaaatgttagtctacatagatgggtgattgtaactttattgccattaaaagatttcaaattgcattcatgcttctgtgtacacataatgaaaaatgggcaaataatgaagatctctccttcagtctgctctgtttaattctgctgtctgctcttctctaatgctgcgtccctaattgtacacagtttagtgatatctaggagtataaagttgtcgcccatcaataaaaatcacaaagttggttt

SEQ ID NO: 276 - DNA, 2930 bp, Homo sapiens
  ref <308>: DATABASE ACCESSION NUMBER: X91249
  ref <309>: DATABASE ENTRY DATE: 2001-06-18
gaattccggtttcttcctaaaaaatgtctgatggccgctttctcggtcggcaccgccatgaatgccagcagttactctgcagagatgacggagcccaagtcggtgtgtgtctcggtggatgaggtggtgtccagcaacatggaggccactgagacggacctgctgaatggacatctgaaaaaagtagataataacctcacggaagcccagcgcttctcctccttgcctcggagggcagctgtgaacattgaattcagggacctttcctattcggttcctgaaggaccctggtggaggaagaaaggatacaagaccctcctgaaaggaatttccgggaagttcaatagtggtgagttggtggccattatgggtccttccggggccgggaagtccacgctgatgaacatcctggctggatacagggagacgggcatgaagggggccgtcctcatcaacggcctgccccgggacctgcgctgcttccggaaggtgtcctgctacatcatgcaggatgacatgctgctgccgcatctcactgtgcaggaggccatgatggtgtcggcacatctgaagcttcaggagaaggatgaaggcagaagggaaatggtcaaggagatactgacagcgctgggcttgctgtcttgcgccaacacgcggaccgggagcctgtcaggtggtcagcgcaagcgcctggccatcgcgctggagctggtgaacaaccctccagtcatgttcttcgatgagcccaccagcggcctggacagcgcctcctgcttccaggtggtctcgctgatgaaagggctcgctcaagggggtcgctccatcatttgcaccatccaccagcccagcgccaaactcttcgagctgttcgaccagctttacgtcctgagtcaaggacaatgtgtgtaccggggaaaagtctgcaatcttgtgccatatttgagggatttgggtctgaactgcccaacctaccacaacccagcagattttgtcatggaggttgcatccggcgagtacggtgatcagaacagtcggctggtgagagcggttcgggagggcatgtgtgactcagaccacaagagagacctcgggggtgatgccgaggtgaacccttttctttggcaccgcccctctgaagaggtaaagcagacaaaacgattaaaggggttgagaaaggactcctcgtccatggaaggctgccacagcttctctgccagctgcctcacgcagttctgcatcctcttcaagaggaccttcctcagcatcatgagggactcggtcctgacacacctgcgcatcacctcgcacattgggatcggcctcctcattggcctgctgtacttggggatcgggaacgaaaccaagaaggtcttgagcaactccggcttcctcttcttctccatgctgttcctcatgttcgcggccctcatgcctactgttctgacatttcccctggagatgggagtctttcttcgggaacacctgaactactggtacagcctgaaggcctactacctggccaagaccatggcagacgtgccctttcagatcatgttcccagtggcctactgcagcatcgtgtactggatgacgtcgcagccgtccgacgccgtgcgctttgtgctgtttgccgcgctgggcaccatgacctccctggtggcacagtccctgggcctgctgatcggagccgcctccacgtccctgcaggtggccactttcgtgggcccagtgacagccatcccggtgctcctgttctcggggttcttcgtcagcttcgacaccatccccacgtacctacagtggatgtcctacatctcctatgtcaggtatgggttcgaaggggtcatcctctccatctatggcttagaccgggaagatctgcactgtgacatcgacgagacgtgccacttccagaagtcggaggccatcctgcgggagctggacgtggaaaatgccaagctgtacctggacttcatcgtactcgggattttcttcatctccctccgcctcattgcctatttggtcctcaggtacaaaatccgggcagagaggtaaaacacctgaatgccaggaaacaggaagattagacactgtggccgagggcacgtctagaatcgaggaggcaagcctgtgcccgaccgacgacacagagactcttctgatccaacccctagaaccgcgttgggtttgtgggtgtctcgtgctcagccactctgcccagctgggttggatcttctctccattcccctttctagctttaactaggaagatgtaggcagattggtggttttttttttttttttaacatacagaattttaaataccacaactggggcagaatttaaagctgcaacacagctggtgatgagaggcttcctcagtccagtcgctccttagcaccaggcaccgtgggtcctggatggggaactgcaagcagcctctcagctgatggctgcacagtcagatgtctggtggcagagagtccgagcatggagcgattccattttatgactgttgtttttcacattttcatctttctaaggtgtgtctcttttccaatgagaagtcatttttgcaagccaaaagtcgatcaatcgcattcattttaagaaattatacctttttagtacttgctgaagaatgattcagggtaaatcacatactttgtttagagaggcgaggggtttaacccgagtcacccagctggtctcatacatagacagcacttgtgaaggattgaatgcaggttccaggtggagggaagacgtggacaccatctccactgagccatgcagacatttttaaaagctatacacaaaattgtgagaagacattggccaactctttcaaagtctttctttttccacgtgcttcttattttaagcgaaatatattgtttgtttcttcctaaaaaaaaaaaaaaaaaaaaa

SEQ ID NO: 277 - DNA, 1309 bp, Homo sapiens
  ref <308>: DATABASE ACCESSION NUMBER: AF039067
  ref <309>: DATABASE ENTRY DATE: 2001-06-18
atgtgtcactctcgcagctgccacccgaccatgaccatcctgcaggccccgaccccggccccctccaccatcccgggaccccggcggggctccggtcctgagatcttcaccttcgaccctctcccggagcccgcagcggcccctgccgggcgccccagcgcctctcgcgggcaccgaaagcgcagccgcagggtctctctaccctcgagtggtgagtatcgccgaagtgggcattcgcggtgtgcgctgccctggagtcactggggaacgacccgactccagagcctcgacctgacctgtctcctgttttgtctccccttagtccggcgccagctgccagtcgaggaaccgaacccagccaaaaggcttctctttctgctgctcaccatcgtcttctgccagatcctgatggctgaagagggtgtgccggcgcccctgcctccagaggacgcccctaacgccgcatccctggcgcccacccctgtgtcccccgtcctcgagccctttaatctgacttcggagccctcggactacgctctggacctcagcactttcctccagcaacacccggccgccttctaactgtgactccccgcactccccaaaaagaatccgaaaaaccacaaagaaacaccaggcgtacctggtgcgcgagagcgtatccccaactgggacttccgaggcaacttgaactcagaacactacagcggagacgccacccggtgcttgaggcgggaccgaggcgcacagagaccgaggcgcatagagaccgaggcacagcccagctgggctaggccggtgggaaggagagcgtcgttaatttatttcttattgctcctaattaatatttatatgtatttatgtacgtcctcctaggtgatggagatgtgtacgtaatatttattttaacttatgcaagggtgtgagatgttccctctgctgtaaatgcaggtctcttggtatttattgagctttgtgggactggtggaagcaggacacctggaactgcggcaaagtaggagaagaaatggggaggactcgggtgggggaggacgtcccggctgggatgaagtctggtggtgggtcgtaagtttaggaggtgactgcatcctccagcatctcaactccgtctgtctactgtgtgagacttcggcggaccattaggaatgagatccgtgagatccttccatcttcttgaagtcgcctttagggtggctgcgaggtagagggttgggggttggtgggctgtcacggagcgactgtcgagatcgcctagtatgttctgtgaacacaaataaaattgatttac

SEQ ID NO: 278 - DNA, 535 bp, Homo sapiens
  Modified_base 1 ... 535: n = a,c,g, or t
  ref <308>: DATABASE ACCESSION NUMBER: N38966
  ref <309>: DATABASE ENTRY DATE: 2001-06-18
gtggtgaaaattagagagtcctactttctaaataatccaaggtgttgcataaattggtatctcagaggaataaactagcatttcatttcaaatttcaagtctttatcaaggattttacaatttaaagttacacatttgttataggaaaattaaatgcttcacttttgttttgttttgttttgttttgtaatgcagaaaaatatgatccattattcatgcaccctgatctgtcttgtggaacacacactagtagctgtgggcacattatgcatgcccattgttggcaaaggtaatgtatattcttaatatttgtcaagagaagtttatctaagggctcaatattttttaaatagaggaaatttcattctagaaaaaaggaaaagaactaaaaatgttgaaaaaatccgtatcattgcctaataaataacnaaagttatttgccctgtcatagatggtaaagtgtatgtcagatatgttttttaatttagccttatatccaagtcncctcnatatcctcccaaggaaggaagtggga

SEQ ID NO: 279 - DNA, 1537 bp, Homo sapiens
  ref <308>: DATABASE ACCESSION NUMBER: J05068
  ref <309>: DATABASE ENTRY DATE: 2001-06-18
gctctcattaccttctgcccatcacttaataaatagccagccaattcatcaacattctggtacactgttggagagatgagacagtcacaccagctgcccctagtggggctcttactgttttcttttattccaagccaactatgcgagatttgtgaggtaagtgaagaaaactacatccgcctaaaacctctgttgaatacaatgatccagtcaaactataacaggggaaccagcgctgtcaatgttgtgttgtccctcaaacttgttggaatccagatccaaaccctgatgcaaaagatgatccaacaaatcaaatacaatgtgaaaagcagattgtcagatgtaagctcgggagagcttgccttgattatactggctttgggagtatgtcgtaacgctgaggaaaacttaatatatgattaccacctgactgacaagctagaaaataaattccaagcagaaattgaaaatatggaagcacacaatggcactcccctgactaactactaccagctcagcctggacgttttggccttgtgtctgttcaatgggaactactcaaccgccgaagttgtcaaccacttcactcctgaaaataaaaactattattttggtagccagttctcagtagatactggtgcaatggctgtcctggctctgacctgtgtgaagaagagtctaataaatgggcagatcaaagcagatgaaggcagtttaaagaacatcagtatttatacaaagtcactggtagaaaagattctgtctgagaaaaaagaaaatggtctcattggaaacacatttagcacaggagaagccatgcaggccctctttgtatcatcagactattataatgaaaatgactggaattgccaacaaactctgaatacagtgctcacggaaatttctcaaggagcattcagtaatccaaacgctgcagcccaggtcttacctgccctgatgggaaagaccttcttggatattaacaaagactcttcttgcgtctctgcttcaggtaacttcaacatctccgctgatgagcctataactgtgacacctcctgactcacaatcatatatctccgtcaattactctgtgagaatcaatgaaacatatttcaccaatgtcactgtgctaaatggttctgtcttcctcagtgtgatggagaaagcccagaaaatgaatgatactatatttggtttcacaatggaggagcgctcatgggggccctatatcacctgtattcagggcctatgtgccaacaataatgacagaacctactgggaacttctgagtggaggcgaaccactgagccaaggagctggtagttacgttgtccgcaatggagaaaacttggaggttcgctggagcaaatactaataagcccaaactttcctcagctgcataaaatccatttgcagtggagttccatgtttattgtccttatgccttcttcttcatttatcccagtacgagcaggagagttaataacctccccttctctctctacatgttcaataaaagttgttgaaagattaac

SEQ ID NO: 280 - DNA, 2570 bp, Homo sapiens
  ref <308>: DATABASE ACCESSION NUMBER: AB005047
  ref <309>: DATABASE ENTRY DATE: 2001-06-18
tcggaggagccagccgaaatcctgccgcctgcccgggacgaggaggaggaggaggaagaggggatggagcaggggctggaggaggaagaagaggtggatccccggatccagggagaactggagaagttaaatcagtccacggatgatatcaacagacgggagactgaacttgaggatgctcgtcagaagttccgctctgttctggttgaagcaacggtgaaactggatgaactggtgaagaaaattggcaaagctgtggaagactccaagccctactgggaggcacggagggtggcgaggcaggctcagctggaagctcagaaagccacgcaggacttccagagggccacagaggtgctccgtgccgccaaggagaccatctccctggccgagcagcggctgctggaggatgacaagcggcagttcgactccgcctggcaggagatgctgaatcacgccactcagagggtcatggaggcggagcagaccaagaccaggagcgagctggtgcataaggagacggcagccaggtacaatgccgccatgggccgcatgcgacagctggagaagaaactcaagagagccatcaacaagtccaagccttattttgaactcaaggcaaagtactatgtgcagctcgagcaactgaaaaagactgtggatgacctgcaggccaaactgaccctggcaaaaggcgagtacaagatggccctgaagaacctggagatgatctcagatgagatccacgagcggcggcgctccagtgccatggggcctcggggatgcggtgttggtgctgagggcagcagcacatctgtggaggatctgccagggagcaaacctgagcctgatgccatttctgtggcctcggaggcctttgaagatgacagctgtagcaactttgtgtctgaagatgactcggaaacccagtccgtgtccagctttagttcaggaccaacaagcccgtctgagatgcctgaccagttccctgcggttgtgaggcctggcagcctggatctgcccagccctgtgtccctgtcagagtttgggatgatgttcccagtgttgggccctcgaagtgaatgcagcggggcctcctcccctgaatgtgaagtagaacgaggagacagggcagaaggggcagagaataaaacaagtgacaaagccaacaacaaccggggcctcagcagtagcagtggcagtggtggcagcagtaagagccaaagcagcacctcccctgagggccaggccttggagaaccggatgaagcagctctccctacagtgctcaaagggaagagatggaattattgctgacataaaaatggtgcagattggctgattcatcctgggccctggccgatgtgcatatcaacatttatacatggaactggagaacattgtgccaataatcatttaatatatgccaaatcttacacgtctactctaaactgctctaatgaagtttcagtgaccttgagggctaaagattgttcttctgggtaagagctcttgggctggtttttcagagcagagttcttgttgtgggtagactgtgactaggttcacagcctttgtggaacattccgtataacggcattgtggaagcaataactagttcctatgaaagaaccagagctgggaagatggctgggaagccaggccaaagtgggggcaacagcttgcttctctttctcttctcaccctcagtttgtatgggaaaatggagatgtcctctccactttatcccacgatatctaaatgaaaaagaaagaaaacccacacacaaagcaaaaactcaagtattaagagcacatatttttgacccagtggaggcttaaaaaaaaaaaaatccaagaacacaattcattttcaccacctctggtgttcagagggggcttttaaaaaagcgtgtatgctgggatacccattaaaaccattttctagaaggctaccatgagctgcactttttggggtgggaaaggtgaatgccagtggggatgcggggggatgagggtaggagggacttatagaaggggatttgtggctgtgggggagaaggttctacagcataagccttatcctgccagccaaggggatttattctaagagaagtgcatgtgaagaatggttgccactgttattagattgacaagatgttaatttctctgtaggttgtaactttaaaaataaatgaaattatttaagggttatgctgcactagtattccttagaggaaacagttctttaaagttaggaaagggagtaggcaggcatgtgttggcaaaggctgttaatagtagttaagtgttaagactgcttttctttaacgttttcatggtaatgcatatttagagcactgtatttttgtcttgttaagaaaatttagcatttctaaaagaaaaaagcaaccctctttcaaactgttaattctgtcacagcctgtatattttagtcatttgtaaatctcttcatacaatagtgacttcttttttgactgatacagtatcttaattacaaggttattttgtacttgtcttaatacactaagtgtaataaaaacggcttgag

SEQ ID NO: 281 - DNA, 2005 bp, Homo sapiens
  ref <308>: DATABASE ACCESSION NUMBER: Z29331
  ref <309>: DATABASE ENTRY DATE: 2001-06-18
cagttattggcctatcctaaccccatagatcctctcaatggtgacgctgcagccatgtacctccaccgaccagaagaatacaagcagaaaattaaagagtacatccagaaatacgccacggaggaggcgctgaaagaacaggaagagggtaccggggacagctcatcggagagctctatgtctgacttttccgaagatgaggcccaggatatggagttgtagtagaaaaagcacctgcttttcagaaagactattatttcctaaccatgagaagcagactataatattcatatttaaacaaagcaattttttttattactaaacaaggtttttatgaataatagcattgatatatatatattatatatcaccctttagatcttgatttcttggtcatttctcaacctgaggtgcatagcatattcccacattccatttggtagcaatatgcggtctgaatgcatgcattcatgagtccatgtggccaagtcagcctgtgtgctactgaactgtcgaaggaaatagccgctctgataggtagatgtgagtaaaaagaacaggaaaaaattgcttcttttattggtttccaaagaaacaaaccaaaccaaccagctcttggatgtgaagataaaatagtgcttttttgaaatggagaggaaaaacttggggaggaagaggcctgctgtgggggcatcggagccagccatgtaagaatcagagctgctccttcctgtgaatcctaggtggccctatgtcttctgtggagttacagtataaagcagggagctaattaagagtattaaaacttaaaaccattttttgactctgattttaagtacatttttatatgtcagttgctgcccttcacactaccaggccctgcagccacagtgttctgttggagaaacttggggaagtgttttctgaaccagttctttttcttggggtagagcgtgaaatccagacctgtttttgaaaggacagcacaggaggagaaaagtgactgggacgatgcttcctctcatccaaaacacatgcagagtcacatcctcatcctagtgtttggcagtttgagaccgctaccctgaacttaagagctttaaatatgagggttgtgtttctgggggggttatttttttggtgtgtgtgtgtgtgtattgtgcttagaaaggttgcagatttcatcttcacctaccaagagcagacggccgctccttggcccaagccgctcatggaccattagacttgagaagacgacccacatggtgactgcaaagccctgggtacttgccttcatgttctggtttggttttccctttttctgctgctcttggcagcagcctggtcatcatctgcttgtgggagtgggaaatgggtattttagacccaacacaggttctaaatttaaaacaaataataattggaacaaataaaggttcttgtacccagagtgattctacatgggaaaaacaaaccagcttttttcagagagtgaccgaataggaagaagggattcagaaatatgatgtagtagaacatgccctgcaggaagaaaatgttttctctcctgcgtatgttaagaggaaatcagtttaaaatgcctgctaatcaaatgtcgactcagctaaccatatgtccaggttgctgcagagtttctttcaaatctgagtgttgcctgctgaactcgggggggagtttggagaaattttagacagcagctctgtgttctttttttgccgcagccaataagataatagcagaattagccaatcctaaaaccttctaaagcgatttttgagcatcccactgggattatttaatttttctttttgacgtgtgtttttagtttacaagtgctgtattccacaaggtttaagtcagtgaggttggaagataccctatcttttttattcaaaaagcacaatcaatcttttgtttgaaaatctatataaagtacaacttgcttttagctgattattttcctaaataaaaagacaaagaattt

SEQ ID NO: 282 - DNA, 544 bp, Homo sapiens
  ref <308>: DATABASE ACCESSION NUMBER: AI479332
  ref <309>: DATABASE ENTRY DATE: 2001-06-18
tttgctgacatcattcttaggaagtggtgtgcacatgccgtggaactttacatggaacatggagctctggggagcaggagtgctcttggagtgaggggtggtctgcggtggcccaggcaccccctggctgtccgtgaaatggctttgaaatgagcaggcactgttgagggcctcagtggctttttggtatttggctgtcttttcacttatgactcttgggtaatggcaagataacttttggggaaaatgttagtttaaaaagaaaaaaaatcaggccagcactttcactcattcctgtctgagctggtcccttcctttggccaaagctgaactaaaccaatggccttctcagactcgacttccagacagaggagccgacattggggcaaatcagttggtggtgtaatttcctgtgatgttaactttgggaacttgaacttggagtgggagctagcattttgacatgtgtccctctaacaggacttgcttgtgtggaaacagacccccacatacatggctgcgccattgtctccaattctggatt

SEQ ID NO: 283 - DNA, 457 bp, Homo sapiens
  ref <308>: DATABASE ACCESSION NUMBER: AI151509
  ref <309>: DATABASE ENTRY DATE: 2001-06-18
tggtttgagagttctttttattattgttattattacatctctgatagggagtccagttttcttgattttgcgatagccaataataattgagggagttttataatgattcagcatgggaaaatcagagttaagaaactgcccagaggttccctgcaattcctggttgtggcctttcattgttactgttcacagactcaatctttgtcatcctgctggaagtgaggccaccccttctccctcagggtttgctgctgctgcctgagctgtttcctccctagcagccaatgggctagtgaggctgtgggtatggtatgatgcacatctaagtaatgatggcccggaactttaaaaaagcaaaaagctcagtgaattattattattagtccttcttcagaagtacagagaaagggatcctatcgcattggagaagtgtgggctgcaccagttagattgtcag

SEQ ID NO: 284 - DNA, 6239 bp, Homo sapiens
  ref <308>: DATABASE ACCESSION NUMBER: D86985
  ref <309>: DATABASE ENTRY DATE: 2001-06-18
cgatctgcttctgatgaaagctctggtatcgagactttagtggaggagctctgctccagactgaaagaccttcagagtaagcaagaagagaagattcacaaaaagttagaggggtctccctctccagaggcagaattatcccctccagcaaaggatcaagtggaaatgtactatgaagcatttccaccactttctgagaaaccagtttgcctgcaagaaatcatgactgtgtggaacaagtctaaagtctgttcttactctagctcttcttcatcatccacagccccaccagctagcacagatacttcctctcctaaggactgcaacagtgaaagtgaagtcaccaaggaaagaagcagtgaagtacccaccactgtgcatgagaaaacccagagcaaaagcaaaaacgagaaggaaaacaaatttagtaatggcacaattgaagaaaagcctgctttgtacaaaaagcaaatccgacataaacctgaaggaaagattcgccctcgctcgtggtcttctggctccagtgaagcaggctcaagttccagtgggaatcagggagaattaaaagcatccatgaagtatgttaaagtaagacacaaggcacgagagattcgaaacaaaaaagggcggaatgggcaaagcaggctttctttgaagcacggtgaaaaggctgaaaggaacattcatactggaagtagtagcagtagcagcagtggttctgtcaaacagctgtgcaagcggggtaagagacctttaaaagaaatagggagaaaagatcctgggagcactgaaggaaaagacctgtacatggagaatagaaaggacacagagtataaagaggagcccttgtggtacaccgagccaattgctgaatattttgttcctctgagcagaaaaagtaaactagagaccacataccgaaacagacaggatacaagtgatctgacatcagaggcagtggaagaattgtctgaatcagtgcatggtctttgtatcagcaacaataatcttcataaaacatacctcgcagcaggtactttcattgatggtcattttgtagaaatgcctgcagttataaatgaggatattgacctcactgggacctcattatgttctctaccagaggacaataaatacctggatgatattcatctatcagaattaacgcacttctatgaagtggatattgatcaatccatgttggatcctggtgcctcagaaacaatgcaaggagaaagtcggattttgaatatgattcgacagaaaagcaaagagaacacagattttgaggcagaatgttgcatagtgttagatggtatggagttgcaaggggaacgtgcaatatggacagattctaccagctccgtaggtgctgagggcttattcctgcaggaccttggcaatctggctcagttttgggagtgctgttcatccagctccggtgatgctgatggggagagttttggaggagactctccagttagactctctcccatcttagacagcacagtgctcaattcacacctgcttgctggcaatcaagagctcttttcagatattaatgaaggatctggtataaactcttgtttttcagtgtttgaagtgcaatgcagtaattctgttttaccattttcttttgaaacactcaacttgggaaatgaaaatacagattctagtgctaatatgcttgggaaaacacagtctagattgctaatatggaccaaaaatagtgcctttgaagaaaatgaacactgttctaatctttcaacaagaacttgtagtccatggtcccattcagaagaaacacgttcagacaatgaaacattaaatattcagtttgaagaatccacacagtttaatgccgaagatattaattatgtagttcctagagtctcgtcaaattatgtagatgaagaacttctagattttttgcaagatgaaacttgccagcaaaacagtagaactttaggtgagattcctacattagttttcaaaaaaacatctaaactagaatccgtctgtggtattcagctagaacaaaaaacagaaaacaaaaattttgaaactacacaagtatgtaatgaaagtccacatggagatggctacagctcaggggttattaaagacatttggacaaagatggcagacacaaattctgtggctacagtagaaatagaaagaactgatgctgagttgttttcggcagatgtaaataactactgctgctgtctagatgctgaagctgaactggagacccttcaggagcctgataaggctgtgcggaggtcagagtaccatctgtgggagggacagaaagagagcctggagaaaagagcatttgcttctagtgagctatcaaacgtggatggtggtgattatacaacaccctctaaaccctgggatgtagcccaagataaagaaaacacattcattcttggaggagtttatggagaactcaaaaccttcaatagtgatggggagtgggcagtcgtaccacctagtcacacaaaaggaagtctgttacagtgtgcagcttctgatgttgtgacgatagctggtacagatgtctttatgaccccaggaaacagttttgctcctgggcacaggcagttatggaaacccttcgtgtcatttgaacagaatgatcagccgaagagtggggaaaatgggttaaataagggattttcttttatcttccatgaagacttactaggagcttgtggcaactttcaagtcgaagatcctggacttgaatactcattttcttcctttgacttaagcaatccattttcacaagttcttcatgtagaatgctcatttgaacctgaagggattgcatctttcagccccagttttaaaccgaaatcaatcctctgttctgattcagacagtgaagtgtttcaccccaggatatgtggtgttgacagaacacaatacagggctattcggatctctcctcggactcactttcgcccaatttctgcatccgaactgtccccaggaggaggaagcgagtcagaatttgaatctgagaaagatgaagcaaatattcccattccttctcaagttgatatatttgaagatccgcaggcagatctcaaacctttggaagaagatgcagagaaagaaggccattactatggaaaatcagagcttgagtctggaaaattccttcccaggttaaaaaaatctgggatggaaaagagtgctcagacatcactggattcccaggaggaatcaactgggattctttcagtaggaaagcaaaatcagtgtttggaatgtagcatgaatgaatccctggaaatagatttagaaagctcagaagcaaattgtaaaataatggcacaatgcgaggaagaaattaataatttttgtggttgcaaagcaggttgtcagtttcctgcttatgaagataatccagtttcttcgggacagctggaagagttccctgtattgaacactgatatacaaggaatgaatagaagtcaagaaaaacagacctggtgggaaaaagccttgtactctcctctttttcctgcatcagagtgtgaagaatgttacacaaatgccaagggagagagtggtttagaagaatatccagatgctaaagagacacccagtaatgaagagcgcctgttagattttaatagggtgtcttctgtttatgaagcaagatgtacaggagagagagattctggagcaaagtcagatggcttccgcggaaagatgtgctccagcgccagctccacctcggaagagacaggctcagaaggcggaggcgagtgggtgggccctagtgaagaggagctcttttctcgaactcatctctaaacctgcaaaatagtacaaattattgtttaaaaatgatatgtgatggaaaattactcttcagtgagacctgttaatctaaaacaacaacttaggtttcctcttcaattaactgattcagattggtaataattatctttctcttcttgcttattttagagttgaggacagctatcctgttaaagattttttttcccagctgttaaattcttggctatttgaaatagactagattgtgttgtcaaatcaagaatgggtgtgcatgtgcttgtcttagaagtatcactgctttttgcatcttaactgcagttaattttccttccgactgcggttatatcactatgaccttactagcattgcagtgtcaacaaccacttctgctcttcagagacttcagctttggagcatttaggctttgttctccaagaactgggatatccattcttaccctacagtggcttgatgcctttctgaaggcgagagggaagcctgggtgactcagcggtggtctccattcagcaaaatctcatgtacatttccagtaggaaccgcagaggtgtgcttttcaagactcaccaaatactgtgttttctctcttaggatttcttttcccctaaagtatcacggaagatactatggttcgtgactttcttgctaactgaagaagccaaggatttggggtgtggggtcgtatgcgagacacagtggggtaagggtgcataccccaccccttacctgctctcatactgcagttacatttacaccaaaaccccatgcagggttctttgtggtgagtgttccatacgtgctaaggaccttagttgcagattgttactttctggtgacctatgttgaattgaaacccccaaaacttgaaattgtgaacatttgacatgcagtaaaggccacctcatcacccagagaaatctttggctgctgcagctagccgcttcttggctgtgatgtagtatagcttcgatctcattttgtgtttgagagaatgttctgggcaagttctgtgtgtggtgggttggggcgggtagagtcatgagttttccacatccctgtgtggtggttttgctgactgtcgctccgtgggactggctcccgtttctccttggtgagcccggggagccggcgcatcttgtgagtcgcgtctgtgcatggcgatccgctcctccggctctcatggcattgtgccacaggcagaggccaggaggagcagtatgtgcacagccgaaacattttacattttttacattgtttttcttttttaaccaactcattgtttaaaaaacaaaaacaaaaaaaacctaatctgtgaaatcagcgtagcatgcctggagcatcaggaatggcagaaaagtctgatgcgctctagacagcttcaccactcatttgggcaggcagtaaacacacatataatttattagctgggagctgaactggctgtgaaatctatgatttgctttgaacatttgggttttgttgcctttttcttaattgataacacagaaaagaaagtaccatcaaagactgtggagtcattgagggtctgtgtgtcctcaccgagagggacctggtgtgcccgccgggtcgatcttcccacgtgttagggtttatttttatacaacacatcttttgacactttaaggtgggtgggtgtgtgtgtgtgtgtgtgtgtgcgcgcgtgcgcgcgcgcatgtgtaaggttttatgttgctgttatttatttacgaacttcagatacgtttttatgtatttttcattcttctggagcttcctaaaaattgataagcatctgcactgaaatataatttaacagcaaaagtaaaaaaggattgaaagttgtaaattcctcatatcactacagtgacgattattctagaaatcgttgcttgtgtagcaaagaccaaataaatagatttcagacacaaccttgagcacagttgattttggacagctgctgtttattaggaaagggctccaggtggcaaaggtgcacacttcctcagacacaggtgagaagatgcagcaccttccacaggtgaatgggacggattcgaagtgagcaaagggattcacaaattatgtatttatttgttttcatagttaagtagctgaagctcagaggctttcagcaacagagatgaaagtgtggctttttagttttgtgaatggatgatcacaaagaaaaagcatttttaaaaagttggcaaacgctgaaacgcactgtggtatgaagcgcattgcatttccatagcactgaagtaccagtttccattcctgggctgagattgtttttcccgtggttgtattgttctgatttcacgtacaccagagtaactgatttttttttgtttgttttcttgtggagttaacaccaaataaaaattgtaaaaaac

SEQ ID NO: 285 - DNA, 2637 bp, Homo sapiens
  ref <308>: DATABASE ACCESSION NUMBER: L05515
  ref <309>: DATABASE ENTRY DATE: 2001-06-18
aacatttacaacaaagttgattctgtgtagggttggaggctagacagttccacaaatttttagtcacattttccatgtcagttaaatctagggagttcaagactactggaaaaattagtctcattactaaaagaaacttagagaccgagggaggtaccagagtctaggaggtacctctgggttgcagaagtaattgtaaaataccagacctgttctttttactaaaagctagtttcactatcttctggtctgaaatactgaggcaaatactcaagacttattttcttcctaatcttgctggtgaaacagaagttactagaaagaaaggaagaaaaaacttgatttggtgactgcaggaagcaacacgttgctgcttttattctacagataatgatttatgaggaatccaagatgaatttggagcaggagaggccgtctgtctgcagtgccccaggctgctcccagcgcttcccaacagaggaccatctgatgattcataggcacaaacatgaaatgactttgaagtttccttcaataaagacagacaatatgttatcagatcaaactccgaccccaacgagattcctgaagaactgcgaggaggtgggcctcttcagcgagctggactgctccctggagcacgagttcaggaaggctcaggaagaggagagcagcaagcggaatatctcgatgcataatgcagttggtggggccatgacggggcccggaactcaccagcttagcagcgctcggctgcccaaccatgacaccaacgttgtgattcagcaagccatgccgtcgcctcagtccagctctgtcatcactcaggcaccttccaccaaccgccagatcgggcctgtcccaggctctctatcttctctgctacatctccacaacagacagagacagcccatgccagcctccatgcctgggaccctgcccaaccctacaatgccaggatcttccgccgtcttgatgccaatggagcgacaaatgtcagtgaactccagcatcatggggatcgaaggtccaaatctcagcaacccctgtgcttctccccaggtccagccaatgcattcagaagccaaaatgaggttgaaggctgcattgactcaccaccctgctgccatgtcaaatgggaacatgaacaccatgggacacatgatggagatgatgggctcccggcaggaccagacgccacaccatcacatgcactcgcacccgcatcagcaccagacactgccaccccatcacccttacccacaccagcaccagcacccagcacaccatcctcaccctcaaccccatcaccagcagaaccatccacatcaccactcccattcccaccttcatgcacacccagcacatcaccagacctcgccacatccgcccctgcacaccggcaaccaagcacaggtttcaccagcaacacaacagatgcagccaacccagacaatacagccaccccagcccacaggggggcgccggcgaagggtggtagacgaggatccggacgagaggcggcggaaatttctggaacggaaccgggcagctgccacccgctgcagacagaagaggaaggtctgggtgatgtcattggaaaagaaagcagaagaactcacccagacaaacatgcagcttcagaatgaagtgtctatgttgaaaaatgaggtggcccagctgaaacagttgttgttaacacataaagactgcccaataacagccatgcagaaagaatcacaaggatatctaagtccagagagtagccctcctgctagtcctgtcccagcttgctcccagcaacaagtcatccagcataataccatcactacttcctcatcggtcagcgaggtggtaggaagctccaccctcagccagctcaccactcacagaacagacctgaatccgattctttaaaatgcaccatcagacctggcctccaagaagagctgtagcgtaccatgcgtcctttcttttaagggcatttttagaattaactcagacctggaagactcctcagttcttcaaagactggctttcatttttatagttattatggaaatgttgtcttttatacttagttatataagaaaaagggagttatgcaattaatatctatcagcttgggaaacgctttggtgcttttctccagttttctggtaccagttacttgtttataaactgaaccttttctgtatatagccatggtttcattcttatcagtccaaccctttgcctgaaacattgaatcttgttaaaccacagcttttagctaaaatgaggtatacctagatgtcaagtaagacagatccaaggtaactgggtaggaaatcttttgacatcttaactcatgttgagtttgtgctgtggtgtcaccagaattccagataaacacacagcctttcccatacctttttttttcttactataaaatattataagatccattgatgtccaaataataccaccgagcatctcttcacctctcctcctcttggtccacttgctaatgcccagttttcttctccatttccactttttcttaggctccctatttactattcattttgacttccttctgttttatttttttccctttagcattgcatgtgaataagaaaataatgtttaaagaaa

SEQ ID NO: 286 - DNA, 442 bp, Homo sapiens
  Modified_base 1 ... 442: n = a,c,g, or t
  ref <308>: DATABASE ACCESSION NUMBER: N66072
  ref <309>: DATABASE ENTRY DATE: 2001-06-18
ttgaatgacaagctgagttggcagctacatccagagttcatgccatgtgagacctaccttaaaggatgaacgaagctgggtgcagaggcctcaaatgccctgctaagaaatagctgatggccttggggaactgtcatacattttaagcaggaaacagaaggatctaataggaactttagtttctctcttgtcaaattaaagcacacaaaaagcaaggacttgatcttttttttttttttttgtataacaccaatgtcaattctangcctgtcagggcaaattcagtaattaatagcttgttggatgagccagtcattctagattgattntttaaataagcaggctaataaatgagaatttgacataaattttaggggatgtctcttttcagagcaagtgttaaaggtgatttttcatagtcttctggtatnccctaatgcat

SEQ ID NO: 287 - DNA, 533 bp, Homo sapiens
  Modified_base 1 ... 533: n = a,c,g, or t
  ref <308>: DATABASE ACCESSION NUMBER: N57538
  ref <309>: DATABASE ENTRY DATE: 2001-06-18
ttagcctccaatgacctagtattttatttttagtgcctaggcaaggtctgagaaacaaatacattggacaaaacttgttggtcttcttcatccagaaattaagggactcagctcaggaacctctcctggagttgtggctctccccattggttgacattagatattgaattcatgtcatttcctagacaactgtggtgagggatgagttggggggctggagaggaagataatagcacaaattccagtattaggctggattcttctgaaggtgcctggcggttgagaatttagctatgggacccagtgtttcntttctgaaggatcccagtagtctcaaccaagaagcaggacgtaggtgggagagaatgctgtagatttgctccttgccataaattctaggggcagtgagtggggagctcaggttttctgcttcagagaagtctggatgagtgtcccaaggggttatagcaccatgaggaggctcagcttctgcagttgccatataactgngaatccctcatgagaatgatcaa

SEQ ID NO: 288 - DNA, 1791 bp, Homo sapiens
  ref <308>: DATABASE ACCESSION NUMBER: Y10313
  ref <309>: DATABASE ENTRY DATE: 2001-06-18
cctcgtgccagagaaacatgtatcgttttcgatcacagctcttcacggggatttctgctgccgccaccgcccactcttacccccgccgcttctcgactctgttgttagccgaagactcgcctctcagccgcccgccgcacagacgcacgagtaaaaagtgcagctccatcggctgatcctcgctaagctccgactctgggcggcaccgggcgtcccacgatgccgaagaacaagaagcggaacactccccaccgcggtagcagtgctggcggcggcgggtcaggagcagccgcagcgacggcggcgacagcaggtggccagcatcgaaatgttcagccttttagtgatgaagatgcatcaattgaaacaatgagccattgcagtggttatagcgatccttccagttttgctgaagatggaccagaagtccttgatgaggaaggaactcaagaagacctagagtacaagagaaagggattaattgacctaaccctggataagagtgcgaagacaaggcaagcagctcttgaaggtattaaaaatgcactggcttcaaaaatgctgtatgaatttattctggaaaggagaatgactttaactgatagcattgaacgctgcctgaaaaaaggtaagagtgatgagcaacgtgcagctgcagcgttagcatctgttctttgtattcagctgggccctggaattgaaagtgaagagattttgaaaactcttggaccaatcctaaagaaaatcatttgtgatgggtcagctagtatgcaggctaggcaaacttgtgcaacttgctttggtgtttgctgttttattgccacagatgacattactgaactatactcaactctggaatgtttggaaaatatcttcactaaatcctatctcaaagagaaagacactactgttatttgcagcactcctaatacagtgcttcatatcagctctcttcttgcatggacactactgctgaccatatgcccaatcaatgaagtgaagaaaaagcttgagatgcatttccataagcttccaagcctcctctcttgtgatgatgtaaacatgagaatagctgctggtgaatctttggcacttctctttgaattggccagaggaatagagagtgactttttttatgaagacatggagtccttgacgcagatgcttagggccttggcaacagatggaaataaacaccgggccaaagtggacaagagaaagcagcggtcagttttcagagatgtcctgagggcagtggaggaacgggattttccaacagaaaccattaaatttggtcctgaacgcatgtatattgattgctgggtaaaaaaacacacctatgacacctttaaggaggttcttggatcagggatgcagtacccacttgcagtcaaaatggaattcctcgaaaatgtatttgaaacttggacccccagtgatgccttgatgctgcaacgccttaaaacgatgaagatttctcgtttcgaaaggcatttatataactctgcagccttcaaagctcgaaccaaagctagaagcaaatgtcgagataagagagcagatgttggagaattcttctagattttcagaacttgaagactattttctaatttctatttttttttctatttcaatgtatttaaactctagacacagtttttatcttggattaacttagataacttttgtagccagtggttatattgcttataatttaatgtacaatactattgaaactggtgagttctgattattaaatattctctgtaaatcagtaaacatgtataaagt

SEQ ID NO: 289 - DNA, 3634 bp, Homo sapiens
  ref <308>: DATABASE ACCESSION NUMBER: D10040
  ref <309>: DATABASE ENTRY DATE: 2001-06-18
tcaacacaggacaatgcaagcccatgagctgttccggtattttcgaatgccagagctggttgacttccgacagtacgtgcgtactcttccgaccaacacgcttatgggcttcggagcttttgcagcactcaccaccttctggtacgccacgagacccaaacccctgaagccgccatgcgacctctccatgcagtcagtggaagtggcgggtagtggtggtgcacgaagatccgcactacttgacagcgacgagcccttggtgtatttctatgatgatgtcacaacattatacgaaggtttccagaggggaatacaggtgtcaaataatggcccttgtttaggctctcggaaaccagaccaaccctatgaatggctttcatataaacaggttgcagaattgtcggagtgcataggctcagcactgatccagaagggcttcaagactgccccagatcagttcattggcatctttgctcaaaatagacctgagtgggtgattattgaacaaggatgctttgcttattcgatggtgatcgttccactttatgatacccttggaaatgaagccatcacgtacatagtcaacaaagctgaactctctctggtttttgttgacaagccagagaaggccaaactcttattagagggtgtagaaaataagttaataccaggccttaaaatcatagttgtcatggatgcctacggcagtgaactggtggaacgaggccagaggtgtggggtggaagtcaccagcatgaaggcgatggaggacctgggaagagccaacagacggaagcccaagcctccagcacctgaagatcttgcagtaatttgtttcacaagtggaactacaggcaaccccaaaggagcaatggtcactcaccgaaacatagtgagcgattgttcagcttttgtgaaagcaacagagaatacagtcaatccttgcccagatgatactttgatatctttcttgcctctcgcccatatgtttgagagagttgtagagtgtgtaatgctgtgtcatggagctaaaatcggatttttccaaggagatatcaggctgctcatggatgacctcaaggtgcttcaacccactgtcttccccgtggttccaagactgctgaaccggatgtttgaccgaattttcggacaagcaaacaccacgctgaagcgatggctcttggactttgcctccaagaggaaagaagcagagcttcgcagcggcatcatcagaaacaacagcctgtgggaccggctgatcttccacaaagtacagtcgagcctgggcggaagagtccggctgatggtgacaggagccgccccggtgtctgccactgtgctgacgttcctcagagcagccctgggctgtcagttttatgaaggatacggacagacagagtgcactgccgggtgctgcctaaccatgcctggagactggaccgcaggccatgttggggccccgatgccgtgcaatttgataaaacttgttgatgtggaagaaatgaattacatggctgccgagggcgagggcgaggtgtgtgtgaaagggccaaatgtatttcagggctacttgaaggacccagcgaaaacagcagaagctttggacaaagacggctggttacacacaggggacattggaaaatggttaccaaatggcaccttgaaaattatcgaccggaaaaagcacatatttaagctggcacaaggagaatacatagcccctgaaaagattgaaaatatctacatgcgaagtgagcctgttgctcaggtgtttgtccacggagaaagcctgcaggcatttctcattgcaattgtggtaccagatgttgagacattatgttcctgggcccaaaagagaggatttgaagggtcgtttgaggaactgtgcagaaataaggatgtcaaaaaagctatcctcgaagatatggtgagacttgggaaggattctggtctgaaaccatttgaacaggtcaaaggcatcacattgcaccctgaattattttctatcgacaatggccttctgactccaacaatgaaggcgaaaaggccagagctgcggaactatttcaggtcgcagatagatgacctctattccactatcaaggtttagtgtgaagaagaaagctcagaggaaatggcacagttccacaatctcttctcctgctgatggccttcatgttgttaattttgaatacagcaagtgtagggaaggaagcgttcgtgtttgacttgtccattcggggttcttctcataggaatgctagaggaaacagaacaccgccttacagtcacctcatgttgcagaccatgtttatggtaatacacactttccaaaatgagccttaaaaattgtaaaggggatactataaatgtgctaagttatttgagacttcctcagtttaaaaagtgggttttaaatcttctgtctccctgcttttctaatcaaggggttaggactttgctatctctgagatgtctgctacttgctgcaaattctgcagctgtctgctgctctaaagagtacagtgcactagagggaagtgttccctttaaaaataagaacaactgtcctggctggagaatctcacaagcggaccagagatctttttaaatccctgctactgtcccttctcacaggcattcacagaacccttctgattcgtaagggttacgaaactcatgttcttctccagtcccctgtggtttctgttggagcataaggtttccagtaagcgggagggcagatccaactcagaaccatgcagataaggagcctctggcaaatgggtgctcatcagaacgcgtggattctctttcatggcagaatgctcttggactcggttctccaggcctgattccccgactccatcctttttcaggggttatttaaaaatctgccttagattctatagtgaagacaagcatttcaagaaagagttacctggatcagccatgctcagctgtgacgcctgaataactgtctactttatcttcactgaaccactcactctgtgtaaaggccaacagatttttaatgtggttttcatatcaaaagatcatgttgggattaacttgcctttttccccaaaaaataaactctcaggcaagcatttctttaaagctattaagggagtatatacttgagtacttattgaaatggacagtaataagcaaatgttcttataatgctacctgatttctatgaaatgtgtttgacaagccaaaattctaggatgtagaaatctggaaagttcatttcctgggattcacttctccagggattttttaaagttaatttgggaaattaacagcagttcactttattgtgagtctttgccacatttgactgaattgagctgtcatttgtacatttaaagcagctgttttggggtctgtgagagtacatgtattatatacaagcacaacagggcttgcactaaagaattgtcattgtaataacactacttggtagcctaacttcatatatgtattcttaattgcacaaaaagtcaataatttgtcaccttggggttttgaatgtttgctttaagtgttggctatttctatgttttataaaccaaaacaaaatttccaaaaacaatgaaggaaaccaaaataaatatttctgcatttc

SEQ ID NO: 290 - DNA, 356 bp, Homo sapiens
  ref <308>: DATABASE ACCESSION NUMBER: AA993127
  ref <309>: DATABASE ENTRY DATE: 2001-06-18
tttagaggtgaggcaggaggctggacagtggtttattgggggaattatgagccccgatctcaagcagtatggggatgggacttcagaaggaaatatatacactggggtggaacattcctggggtggaactcactggcctgcaagcagcgatgggagggctgggaaggaaaagaagaaatgatgatgcttaaatttccagcttgggtgactgactggtggtgttggctctccgtcctcatcggtggtgacaagtagagaatgacctcagctgtttggctgactcagagttgacagagcacagatacaggaaactcagttttgcagggaccaagggcccagccaagtggccaatccaa

SEQ ID NO: 291 - DNA, 1460 bp, Homo sapiens
  ref <308>: DATABASE ACCESSION NUMBER: X89214
  ref <309>: DATABASE ENTRY DATE: 2001-06-18
gaattcttcagagatgtaagaataggatactatcagagaacaagatagaccttggaatttaaaaacaaaaatgggaaaacaaattcaataaatggatgataaagtcaaggaaatctttcaaaaagcgagtgtgtgtgtatgcatgtgtgtgtgtgcgtgtgtgtgtgtgtgtacatgcctgtgtgtgtggatgcatgcatgtgctgtgaagcagggagaccagctttccgctccttcttgttttctctctgcagtgacctgggagctgtcatttccctcctgctctggggacgacagctttttgcactgtactcaggcaatgatgtcacggatatttcagatgaccgcttcccgaagccccctgagattgcaaatggctatgtggagcacttgtttcgctaccagtgtaagaactactacagactgcgcacagaaggagatggagtatacaccttaaatgataagaagcagtggataaataaggctgttggagataaacttcctgaatgtgaagcagtatgtgggaagcccaagaatccggcaaacccagtgcagcggatcctgggtggacacctggatgccaaaggcagctttccctggcaggctaagatggtttcccaccataatctcaccacaggggccacgctgatcaatgaacaatggctgctgaccacggctaaaaatctcttcctgaaccattcagaaaatgcaacagcgaaagacattgcccctactttaacactctatgtggggaaaaagcagcttgtagagattgagaaggtggttctacaccctaactaccaccaggtagatattgggctcatcaaactcaaacagaaggtgcttgttaatgagagagtgatgcccatctgcctaccttcaaagaattatgcagaagtagggcgtgtgggttacgtgtctggctggggacaaagtgacaactttaaacttactgaccatctgaagtatgtcatgctgcctgtggctgaccaatacgattgcataacgcattatgaaggcagcacatgccccaaatggaaggcaccgaagagccctgtaggggtgcagcccatactgaacgaacacaccttctgtgtcggcatgtctaagtaccaggaagacacctgctatggcgatgcgggcagtgcctttgccgttcacgacctggaggaggacacctggtacgcggctgggatcctaagctttgataagagctgtgctgtggctgagtatggtgtgtatgtgaaggtgacttccatccagcactgggttcagaagaccatagctgagaactaatgcaaggctggccggaagcccttgcctgaaagcaagatttcagcctggaagagggcaaagtggacgggagtggacaggagtggatgcgataagatgtggtttgaagctgatgggtgccagccctgcattgctgagtcaatcaataaagagctttcttttgaccc

SEQ ID NO: 292 - DNA, 2076 bp, Homo sapiens
  ref <308>: DATABASE ACCESSION NUMBER: AF098642
  ref <309>: DATABASE ENTRY DATE: 2001-06-18
cgagcgccagcgcgggaaccgggaaaaggaaaccgtgttgtgtacgtaagattcaggaaacgaaaccaggagccgcgggtgttggcgcaaaggttactcccagacccttttccggctgacttctgagaaggttgcgcagcagctgtgcccgacagtctagaggcgcagaagaggaagccatcgcctggccccggctctctggaccttgtctcgctcgggagcggaaacagcggcagccagagaactgttttaatcatggacaaacaaaactcacagatgaatgcttctcacccggaaacaaacttgccagttgggtatcctcctcagtatccaccgacagcattccaaggacctccaggatatagtggctaccctgggccccaggtcagctacccacccccaccagccggccattcaggtcctggcccagctggctttcctgtcccaaatcagccagtgtataatcagccagtatataatcagccagttggagctgcaggggtaccatggatgccagcgccacagcctccattaaactgtccacctggattagaatatttaagtcagatagatcagatactgattcatcagcaaattgaacttctggaagttttaacaggttttgaaactaataacaaatatgaaattaagaacagctttggacagagggtttactttgcagcggaagatactgattgctgtacccgaaattgctgtgggccatctagaccttttaccttgaggattattgataatatgggtcaagaagtcataactctggagagaccactaagatgtagcagctgttgttgtccctgctgccttcaggagatagaaatccaagctcctcctggtgtaccaataggttatgttattcagacttggcacccatgtctaccaaagtttacaattcaaaatgagaaaagagaggatgtactaaaaataagtggtccatgtgttgtgtgcagctgttgtggagatgttgattttgagattaaatctcttgatgaacagtgtgtggttggcaaaatttccaagcactggactggaattttgagagaggcatttacagacgctgataactttggaatccagttccctttagaccttgatgttaaaatgaaagctgtaatgattggtgcctgtttcctcattgacttcatgttttttgaaagcactggcagccaggaacaaaaatcaggagtgtggtagtggattagtgaaagtctcctcaggaaatctgaagtctgtatattgattgagactatctaaactcatacctgtatgaattaagctgtaaggcctgtagctctggttgtatacttttgcttttcaaattatagtttatcttctgtataactgatttataaaggtttttgtacattttttaatactcattgtcaatttgagaaaaaggacatatgagtttttgcatttattaatgaaacttcctttgaaaaactgctttgaattatgatctctgattcattgtccattttactaccaaatattaactaaggccttattaatttttatataaattatatcttgtcctattaaatctagttacaatttatttcatgcataagagctaatgttattttgcaaatgccatatattcaaaaaagctcaaagataattttctttactattatgttcaaataatattcaatatgcatattatctttaaaaagttaaatgtttttttaatcttcaagaaatcatgctacacttaacttctcctagaagctaatctataccataatattttcatattcacaagatattaaattaccaattttcaaattattgttagtaaagaacaaaatgattctctcccaaagaaagacacattttaaatactccttcactctaaaactctggtattataacttttgaaagttaatatttctacatgaaatgtttagctcttacactctatccttcctagaaaatggtaattgagattactcagatattaattaaatacaatatcatatatatattcacagagtataaacctaaataatgatctattagattcaaatatttgaaataaaaacttgatttttttgt

SEQ ID NO: 293 - DNA, 839 bp, Homo sapiens
  ref <308>: DATABASE ACCESSION NUMBER: AF023611
  ref <309>: DATABASE ENTRY DATE: 2001-06-18
gcgggaccggatttcgtccgtgggcccgggggcggcgggggccggggagtgaggggccggctgagcccacctcgctgggccctccctggcgccccgccttgggcggcggcgagcgcgcgggccgccatgtcgtacatgctcccgcacctgcacaacggctggcaggtggaccaggccatcctctcggaggaggaccgcgtggtcgtcatccgcttcggccacgactgggatcctacgtgcatgaagatggacgaggtcctgtacagcatcgccgagaaggttaaaaattttgcagttatttatcttgtggatattacagaagtgcctgacttcaacaaaatgtatgagttatacgatccatgtactgtcatgtttttcttcaggaacaagcacatcatgattgacttggggactggcaacaacaacaagattaactgggccatggaggacaagcaggagatggtggacatcatcgagacggtgtaccgcggggcccgcaaaggccgcggcctggtggtgtcccccaaggactactccaccaagtaccgctactgaggcgccctcagtctgcgcggataaatgtcgtggagccctttttgtatggaaacgttttaagctatttaaagcctttggaaaatacaggaagctccagggctggagcacctctgagatggaattgataacatggtcttaactcaccgaaataaacaagcacgtggtgagaggagcaggcctacttgtttgttctcaggaaacttaatgaatagattactgattttcctagtcaaagttaattcttacccttggagtaaaacgaaggtgtttatcctgtgaaaaaa

SEQ ID NO: 294 - DNA, 445 bp, Homo sapiens
  Modified_base 1 ... 445: n = a,c,g, or t
  ref <308>: DATABASE ACCESSION NUMBER: N39237
  ref <309>: DATABASE ENTRY DATE: 2001-06-18
gaaagtttaaagatcaggagattttatttaaaagctcagatgttcaatttctcatgagaaatcagaagatctggtgtntctgggcccacattctgcctgtccgctgtggactggagtggaggacagctgcccttccagcggggcccatccaggtgtttgacccaggtgctatacccgccagtccctgacagcagttggctttttgctcttagtacctgtatctgcatcctaaatttgccacgacaaactaccacaaacttaaaacagcagaagtgtattctctcctggttctcaaggccagaagttagaaattaaggtgtcggcagggtcacgcttcctccaaaggctctagagagaatcagtccttgaccgtcccagtttctggagtcgctaggcattcggtggcttgtggcagcataactccagcctctgcctccatctgcat

SEQ ID NO: 295 - DNA, 7758 bp, Homo sapiens
  ref <308>: DATABASE ACCESSION NUMBER: AB011085
  ref <309>: DATABASE ENTRY DATE: 2001-06-18
caagagtgcctgaggctggatcagaaatagccacgatcgtccagtttgattgattgattgattgatttagttgtgatggagtctcgctgtatttcccaggctggagtgcagaggcacgatctccgttcactgcagcctccacctccccggttcaagtgattctcctgcctcagccttccgagtagctgggattacaggcacctgccaccacgcccggctgatttttgtgtttttagtagagacagggtttcgccatgttggccaggctggtcttgaactcctgacctcaggtgagccacccgcctcggcctcccaaagtgttgggattacaggcgtgagccactgcccccagccccagcttgatcttgaacctcctgtgtgtgggcagagagacatggccctgctactgcttgaacggcttccggagacagtgacttgtttcctttttccctctgaactatgccgtagggccaggtgagctgctgtgaaggactcattcttggtagccggcagttactggcaacttgtgagcttggtgggctcctactaacgcacctgggacaccaggctgctgggctcccctctaggcagcctcccctccaggcagcctcaccagcagctcccctgagccatggagaccccagaggtccccgtgggctcgctaatcgactttgggcctgaggcacccacctcttctcccctggaggcaccaccccctgtgctgcaggacggcgatggctccctgggggacggtgcatcagagagtgagaccactgagtctgcggacagtgagaatgacatgggcgagtcgccctcgcacccgtcctgggaccaagaccgccgttcctcctccaacgagtccttctcctccaaccagagcaccgagtctacccaggatgaagagaccctggcactcagggacttcatgcgtggctacgtggagaagatcttctctggaggggaggacttggatcaggaggagaaagccaagtttggagagtactgcagcagtgaaaatggaaaaggccgggagtggtttgctcgatacgtgagtgcccagcgctgcaactccaagtgtgtctcagaggcaaccttctaccgcctggtgcagtcttttgcagtggtgctgttcgagtgtcatcagatggatgactttgggcctgccaagaacctcatgaccatgtgcttcacctactaccacatcggaaaaccacagctgctgcccccggagtcccgggagaagcccgcgggcagcatcgactcctacctgaaatccgcaaacagctggctggccgaaaagaaggacatcgccgagcggctgctgaagaacacctcggccaggactgagaatgtcaagggcttcttcggggggctggagaccaagctgaaggggcccctggccaggaggaacgaggaagacgagaacaaaccccaggagaagcggcccagggctgtgaccgcgtacagccccgaggacgaaaagaagggggagaagatctacctgtacacgcacctgaagcaacagcccatctggcacactctgaggttctggaatgcagccttttttgacgctgtccattgtgagaggacaaagcgatctcccactaccagaggggatgctggagaggaggaggagaagagggagaagtggtgccacatgacccaggaggagcgcgacgacagcctccggttcaacgagaacatcaccttcgggcagctgggcacattcacgcacaacatgctggcctttggactgaacaagaagctgtgcaatgacttcctgaagaagcaggctgtgattggcaacctggatgaagagcaatacaagctgcttagtgaccacattgagcaaatggccactgagtaggccccagaggtcgcactccgcaggaggactgaggccatgtgccattctcccgggcccagcgcccggccgtcaccccacccgatgacctgcatgaagccagcagcacccagagccactcctgctgccctagaactagcggttagaagaatccgctgttcctccctcatctcctctgcctgtgtctgcgacccccatccatgtgccaaagtgtcccttgggtcacacagctaaagccgaggtgaccagttgtaccccgagtgccaggcttgtgagatgagaccaagagggaggaggggaaggactccatgggccatcgtgggccaagggctggcgagggtgggggtgggcaagggatgcaggcaggacagccatgaggtggggctgcagccggcacacccagtggtggagggccggcgctgccactcacggtgggtggccgtgggccaccttccctgcaatgggtgcacacgcggctcccatccagccctctcagcgtggggctgtggctggtcctcactattccccagtctcccgctgtggggcaggaacaggaagtgacgggaaccttgaggaggaaacgcctgtgttagggagagagtgggtgcggtgtagaggatgctcttggccggctggagcaagacctggctcccaccagagggacgtgtgtgtgcctgcagacggcccgggagctgtgtgtctccgccagagtcacagcagtgccgaggtgtccgcggcagaccacacagaccgtctgaaatgcgcccgcctggcggacagctcccttctgaagcagagaagcctccatggtcacgaagcagcgttgtgctgtgtgtccctcgcaagaagcacaggaaagagaagtttctttagtagccactagacaaccaccctttctgaaagcaaacagtgctgctctttattccagacaaggcaggaaagtctgagttgggagtgacagtggctggagagaagcagatctgtgcaacgtgcagggcaagccagtggcgtggcctctgcctctaagcgctgagcattgggccccttccccaccagacctttgtagctcctccagcctctgcagagactcccttcacctcgcacttactgcctgggaaccacggcccttctcttctgtgggtctgcaccaggtactccaggccagcccatgggcccggggcctgaccccaacacctgcatgctgggtccagagccttctgtttcaccgtgcgtggacactgctaggccgcctggggtcccctgcctcctgcctgtcgctgccgtggtccctgactgcgaaataggcccgcggggctctccctcctcctgccatcctcccctcccgcccttcctggctacctcctctgacatgcggtcagataagtcccgtcttgtttgtgagtaccacagaaacgcctgagagtcacttacccggccactgcttggaaggtttccctccggggaatgcctccctggaatgttccagagacggaacattctctagagacaacagtctgtgctgcagattggttggatcacagaatgtgtgtctggggcattatctgaaacgtggtgtcatctgatgcatttggaccatatgctgccagactgcagaacgggggagccggggctcagggcccctgactgcatggtgcatgagtgatctcagcctagcgatgccgctggccagaccgtgaccatgctgccagtgtgctcgccatgagctgggtcagggctggggagttgtgcaggctggggtgacccttcccccatcattgggccccaacgggcatgtctccaccgaatccatttagagaaatgtcagagcgaggggtgtgtggacacccctcgctctgatgccaactgcagataatacacacctcctgcagcgtccagccacggctccagggcactgctctcctccttgcaccggtgaaactcaggccacactcaagggctgactgtccaggcgctcccttcagccgcctcgtcgtcagcgttcttagtcatgcattattcgtgttagctgaaatgcattcagactttgttctgcggtgcccacaggacttacccctgtatgtacaggatttttgtatgaaagttttgtttgattctgagactctcttgggaacgctggagagcttgtgcacagcctctggaaggaaaggcagcgctgacttcgttgggcttttttccaagcactttaacttcagaaatggtcttgacacttttttctccacatagactcttgaaatagccatttcaggggaggaaagggttggggttttctttgtttgtttgtttgtttccccctttactacctgttcttgtagatctagctcctcagagttggaggaaggctgacagagaaggtctcctctgtgctccatccacacaggatgccggagagacagccccttgtgctgtgagcagagcaggcagtggctctggaggctgcctgtggtctccttccagctgtggctgacagtggctctggccagggttgcttggagaaggctcagtgtgcctgggacagggcttaccacctgccaccaaggtttcctctcttcccccaggacctgggcagagcaggcatgagctgggctgtggtgcagagcaagcagacccagccacactgctcaaaggtccctgcgtggggaggtgtcacaccaggggcacacccagggccacctgggtgtaggagagctctggtggcccctccgtaaactcaggaagtgtcaggtgatttcctagggagaggttcccagtcccagcaggcagaatgcccaaaaccaggagcacgaaggcctgtcatccatggggccattgcaggcaccctgccgcccgaccttgagggctgtgccaatcctagtgaaccaaaatgcaaacaactcacacaagtgaaaagctccctgctttgaaaacaggacatgttgacaggcagcatggtatgtttttagcctttgttacagttttagcaacattgatgtctaagaggggccgtggtaatagattgcatctgccctgtgcatgcgcatgtttaaccacaggccagagaactcaattctgatgtcgtaagttctctgtaagtgaaatggggtagactgtatgattttcctattgccaaaagaaagaaagggggccaaacagctctgaaatttccaaaaaatggctagagggagagtccagtttctgagctctgtacccaaattaaaatcctgatgttcaggttaatccaagcaacacgcattgggtttaaaaccagcaccgaggcccagtgggggaatcacagacatcaccaagtctcgtcttctttccttcctgtgagttgaaaccaaacaggcctctcgctcactcctcccagcccagtaatgctgaggagttcagttgtgaggaaagaaggctggagctgtgagattcgcttttccctaggctgttccgcgtgggttaccttatcaccctggagcacttggtattccagacccctgacatgaggaatgcaggttcacactgtaaagagtttgtgaaaggtttcagtctaactggggttccttagctggaagccagggctggaagctacaggcctgaccttcctgggtcccactatctgttggcattttttttttttttttttagacggagttttgctcttgttgcccaggctggagtgcagtgacacaatctctactcactgcaacctccacctcccgggttcaagcaattctcctgcctcagcctcctgagtagctgggatgacaggtgcacgccaccacgcccggctaatttttatatttttggtagagatggggtttcaccatgctggccaggctggtctcgaactcctgacctcaggtgatcccccccacctcagcctcccaaagtgctgggattacaggcgtgaggcatcacacctgcctctgttggctttttagttaggaaggatccagctaggcccgtgtggttagatcagctttgttactgaattacctaaaaccagaccacagcacagccagggagcccagtagtgtttccaagaacagtgtggagcttgagaaagagaactttaaaaattagagggtccctttctgcagaggaagggatgctcgcagggtggcagtggcccagccccagcctcagggacggggagggagagccccctctgggcccagcaggcaggtgttctgaggctggtccctcctcagtttccgcagccacaaggcgaaacggccagattctcactcaaggtcgttctcactccttttcctgtcccgtttccagtcccactgagccattcacttctgctgaaccatttttcttaggatgcagccgtctcactcccttgtcctgtaaatcgtgtattcatgttgatgattcttggagataggtttcactttttcccagctgcgtccacaggaaaggggagtcggatgccagctgcaccccgcctggctcgcacaggctaagaccacagacagagcagggcttcccggagccacacaggccacgcaccccaggaacccttgctgctgcgggccaggaacaggaatgtgttggtgcctgagacaccaaatggaagaagcacatcaagactgttctcctgcggccaacactggcccggaagccgccctccatacaggccctcagggggcctgccttctgcgcctcagtcccccgtgcatccctgggcctgggtatcacatgctctccaggaaagggacggaatcaatcgtgtgaccgatgggctcgcaaggatgggtgccgccgtgggagccctgcctctggtgctggcaagggattgggtttgtgtgggtgtctctagcctgcagagtgcagtgagtgagagtccttgggagcgcggcgctgcctgtagctgcgcctggggatgcacgtggccacgggatttcagtgggacagcgctcccacaggggctgggggtgggggtggggtttcttagttactgttggaaagggaaaaattcaccatatccaaggggagagacgatgggctgggtttgtttactccaacttcccttctacacccctcctgcagaacagtacgatttggggagaacccagctccccactttatctgcagactctgggacctgacaaaacagtcagagcctgagtgcactgcagcctgaactcccttgagcagcgctataagggactttgcactttaaaaaggggatgcctgtcagtaaatcccctgtgcattgactagaactggggggctgcgcccgctccctccttaatcctagatgatttgctcatgaaatagaggtgggggacgaccgcatgcactctgggaggtgcagccctaaggggtggactccagatctccctgcaagagacagcttggcttggctttggctgttggggaggagtccctgccatcccggtgagcctggggctgttgcttagggtcttctgggtggacacgtggagaaagagaaggcaaacgttggaacactaggaaaagctagaaattcagacaacacacatggatccccttaaaacatgtaaatgtgtcagaacacggttgacctgccgccttcttgaacctggtggcccccgttggaactatcagtggcgtctcccatgcacacgccctctgctttctctttcctagactcgcggtgctcacatccagacattaccttgttggtagcccccaagtggcgtgcagtgacaccagtatcttctctgttgcatttttgcaatcttgtgtcccgctcggtgatgttctacaaactctgttttaaggttgagaaagtttcaagggtgaagatctcaaaacagtgctaaaatcaaaggtgtttgctgtgaagaaaaacatgtgtatatattgcaccttgagttgtcagaaggtagaaactgaaataaactaacttt

SEQ ID NO: 296 - DNA, 451 bp, Homo sapiens
  ref <308>: DATABASE ACCESSION NUMBER: AI223310
  ref <309>: DATABASE ENTRY DATE: 2001-06-18
tttttttttttaactccagaaaggaaaagctggcaatgcagctttattgaaattagcttgacatagttgctctggagctcacagacttctctcttcttccccctgaaggtatggagaggttcaaaggccaatatttccatagccgccaatacaagcatccagatggatttgagggaaaacgcatcctggtgattggaatgggaaacttgggctcagatattgctgttgagctgagtaagaatgctgctcaggtgtgatgctctctgcttaccatgtacctgggtcatgagccgtatctctgaagatggctatccttgggactcagtgttccacacccggtttcgttctatgctccgcaatgtactgccacgaacagcttaaggcctccaacaaatatacaccaggagtctggaggagcccttcttagtaaaaagatgtgaatacgagactc

SEQ ID NO: 297 - DNA, 429 bp, Homo sapiens
  ref <308>: DATABASE ACCESSION NUMBER: AA620747
  ref <309>: DATABASE ENTRY DATE: 2001-06-18
tttttttttttccgtttatccaactggtgtttattctgcacttgctgttttctgaggtcttaacatgtgactggtactatgccaaacacttcatattccttcaacagatagcctgtaagctcctgctgtgtgacagacactgttcgaatttctaggaataccacaatgaacaaaacgcaaaaattcctgccccgctggaaaggagggccgacaaaacataaagcctcgctgatggcagaagtcccgcggggaaaaattaagtggggaaggggaaagggagcccaagggggctacaatgtggaatttctgtttcactctcacaactgctttgtgaggagtacataccactatgttacagaagaggacactgaggcacagagaggttgagtgagttgtataaggtcacgaaggtaatcggtgacagctggc

SEQ ID NO: 298 - DNA, 1317 bp, Homo sapiens
  ref <308>: DATABASE ACCESSION NUMBER: AF079221
  ref <309>: DATABASE ENTRY DATE: 2001-06-18
gcggcggactcggcttgttgtgttgctgcctgagtgccggagacggtcctgctgctgccgcagtcctgccagctgtccgacgatgtcgtcccacctagtcgagccgccgccgcccctgcacaacaacaacaacaactgcgaggaaaatgagcagtctctgcccccgccggccggcctcaacagttcctgggtggagctacccatgaacagcagcaatggcaatgataatggcaatgggaaaaatggggggctggaacacgtaccatcctcatcctccatccacaatggagacatggagaagattcttttggatgcacaacatgaatcaggacagagtagttccagaggcagttctcactgtgacagcccttcgccacaagaagatgggcagatcatgtttgatgtggaaatgcacaccagcagggaccatagctctcagtcagaagaagaagttgtagaaggagagaaggaagtcgaggctttgaagaaaagtgcggactgggtatcagactggtccagtagacccgaaaacattccacccaaggagttccacttcagacaccctaaacgttctgtgtctttaagcatgaggaaaagtggagccatgaagaaagggggtattttctccgcagaatttctgaaggtgttcattccatctctcttcctttctcatgttttggctttggggctaggcatctatattggaaagcgactgagcacaccctctgccagcacctactgagggaaaggaaaagcccctggaaatgcgtgtgacctgtgaagtggtgtattgtcacagtagcttatttgaacttgagaccattgtaagcatgacccaacctaccaccctgtttttacatatccaattccagtaactctcaaattcaatattttattcaaactctgttgaggcattttactaaccttataccctttttggcctgaagacattttagaatttcctaacagagtttactgttgtttagaaatttgcaagggcttcttttccgcaaatgccaccagcagttataattttgtcagcaatgctattatctctaattagtgccaccagactagacctgtatcattcatggtataaattttactcttgcaacataactaccatctctctcttaaaacgagatcaggttagcaaatgatataaaagaagctttattgtctagttgttttttttcccccaagacaaaggcaagtttccctaagtttgagctagttgttttttttcccccaagacaaaggcaagtttccctaagtttgagttgatagttattaaaaagaaaaaaaaaaaaaaaaaaa

SEQ ID NO: 299 - DNA, 4853 bp, Homo sapiens
  ref <308>: DATABASE ACCESSION NUMBER: X76061
  ref <309>: DATABASE ENTRY DATE: 2001-06-18
ttcgccgtttgaattgctgcgggcccgggccctcacctcacctgaggtccggccgcccaggggtgcgctatgccgtcgggaggtgaccagtcgccaccgcccccgcctccccctccggcggcggcagcctcggatgaggaggaggaggacgacggcgaggcggaagacgccgcgccgtctgccgagtcgcccacccctcagatccagcagcggttcgacgagctgtgcagccgcctcaacatggacgaggcggcgcggcccgaggcctgggacagctaccgcagcatgagcgaaagctacacgctggagggaaatgatcttcattggttagcatgtgccttatatgtggcttgcagaaaatctgttccaactgtaagcaaagggacagtggaaggaaactatgtatctttaactagaatcctgaaatgttcagagcagagcttaatcgaattttttaataagatgaagaagtgggaagacatggcaaatctacccccacatttcagagaacgtactgagagattagaaagaaacttcactgtttctgctgtaatttttaagaaatatgaacccatttttcaggacatctttaaataccctcaagaggagcaacctcgtcagcagcgaggaaggaaacagcggcgacagccctgtactgtgtctgaaattttccatttttgttgggtgctttttatatatgcaaaaggtaatttccccatgattagtgatgatttggtcaattcttatcacctgctgctgtgtgctttggacttagtttatggaaatgcacttcagtgttctaatcgtaaagaacttgtgaaccctaattttaaaggcttatctgaagattttcatgctaaagattctaaaccttcctctgaccccccttgtatcattgagaaactgtgttccttacatgatggcctagttttggaagcaaaggggataaaggaacatttctggaaaccctatattaggaaactttatgaaaaaaagctccttaagggaaaagaagaaaatctcactgggtttctagaacctgggaactttggagagagttttaaagccatcaataaggcctatgaggagtatgttttatctgttgggaatttagatgagcggatatttcttggagaggatgctgaggaggaaattgggactctctcaaggtgtctgaacgctggttcaggaacagagactgctgaaagggtgcagatgaaaaacatcttacagcagcattttgacaagtccaaagcacttagaatctccacaccactaactggtgttaggtacattaaggagaatagcccttgtgtgactccagtttctacagctacgcatagcttgagtcgtcttcacaccatgctgacaggcctcaggaatgcaccaagtgagaaactggaacagattctcaggacatgttccagagatccaacccaggctattgctaacagactgaaagaaatgtttgaaatatattctcagcatttccagccagacgaggatttcagtaattgtgctaaagaaattgccagcaaacattttcgttttgcggagatgctttactataaagtattagaatctgttattgagcaggaacaaaaaagactaggagacatggatttatctggtattctggaacaagatgcattccacagatctctcttggcctgctgccttgaggtcgtcactttttcttataagcctcctgggaattttccatttattactgaaatatttgatgtgcctctttatcatttttataaggtgatagaagtattcattagagcagaagatggcctttgtagagaggtggtaaaacaccttaatcagattgaagaacagatcttagatcatttggcatggaaaccagagtctccactctgggaaaaaattagagacaatgaaaacagagttcctacatgtgaagaggtcatgccacctcagaacctggaaagggcagatgaaatttgcattgctggctcccctttgactcccagaagggtgactgaagttcgtgctgatactggaggacttggaaggagcataacatctccaaccacattatacgataggtacagctccccaccagccagcactaccagaaggcggctatttgttgagaatgatagcccctctgatggagggacgcctgggcgcatgcccccacagcccctagtcaatgctgtccctgtgcagaatgtatctggggagactgtttctgtcacaccagttcctggacagactttggtcaccatggcaaccgccactgtcacagccaacaatgggcaaacggtaaccattcctgtgcaaggtattgccaatgaaaatggagggataacattcttccctgtccaagtcaatgttggggggcaggcacaagctgtgacaggctccatccagcccctcagtgctcaggccctggctggaagtctgagctctcaacaggtgacaggaacaactttgcaagtccctggtcaagtggccattcaacagatttccccaggtggccaacagcagaagcaaggccagtctgtaaccagcagtagtaatagacccaggaagaccagctctttatcgcttttctttagaaaggtataccatttagcagctgtccgccttcgggatctctgtgccaaactagatatttcagatgaattgaggaaaaaaatctggacctgctttgaattctccataattcagtgtcctgaacttatgatggacagacatctggaccagttattaatgtgtgccatttatgtgatggcaaaggtcacaaaagaagataagtccttccagaacattatgcgttgttataggactcagccgcaggcccggagccaggtgtatagaagtgttttgataaaagggaaaagaaaaagaagaaattctggcagcagtgatagcagaagccatcagaattctccaacagaactaaacaaagatagaaccagtagagactccagtccagttatgaggtcaagcagcaccttgccagttccacagcccagcagtgctcctcccacacctactcgcctcacaggtgccaacagtgacatggaagaagaggagaggggagacctcattcagttctacaacaacatctacatcaaacagattaagacatttgccatgaagtactcacaggcaaatatggatgctcctccactctctccctatccatttgtaagaacaggctcccctcgccgaatacagttgtctcaaaatcatcctgtctacatttccccacataaaaatgaaacaatgctttctcctcgagaaaagattttctattacttcagcaacagtccttcaaagagactgagagaaattaatagtatgatacgcacaggagaaactcctactaaaaagagaggaattcttttggaagatggaagtgaatcacctgcaaaaagaatttgcccagaaaatcattctgccttattacgccgtctccaagatgtagctaatgaccgtggttcccactgaggttagtctcttgtattaaactcttcacaaaatctgtttagcagcagcctttaatgcatctagattatggagcttttttccttaatccagctgatgagttacagcctgttagtaacatgaggggacattttggtgagaaatgggacttaactccttccagtgtccttagaacattttaattcatcccaactgtctttttttccctaccactcagtgattactgtcaaggctgcttacaatccaaacttgggtttttggctctggcaaagcttttagaaatactgcaagaaatgatgtgtacccaacgtgagcataggaggcttctgttgacgtctccaacagaagaactgtgtttcaagttcaatcctacctgttttgtggtcagctgtagtcctcataaaaagcaaaacaaaaattaggtattttgtcctaaaacacctggtaggagtgtgtgattttttgcattcctgacaaaggagagcacacccaggtttggaggtcctaggtcattagccctcgtctcccgttccctttgtgcacatcttccctctccccattcggtgtggtgcagtgtgaaaagtccttgattgttcgggtgtgcaatgtctgagtgaacctgtataagtggaggcactttagggctgtaaaatgcatgattttgtaacccagattttgctgtatatttgtgatagcactttctacaatgtgaactttattaaatacaaaacttccaggctaaacatccaatattttctttaatgcttttatatttttttaaaatgttaaaacccctatagccaccttttgggaatgttttaaattctccagttttttgttatatagggatcaaccagctaagaaaagattttaagtcaagttgaattgaggggattaatatgaaaacttatgacctcttcctttaggagggagttatctaaaagaaatgtctattaaggtgatatatttaaaaatatttttgggtgttcctggcagtttaaaaaaattggttggagaatttaggtttttattagtaccatagtaccatttatacaaattagaaaatgttatttaacagctgaattatctatacatatctttattaatcactattgttccagcagttttcaagtcaaattaataatcttattagggagaaaattcaattgtaaattgaatcagtataaacaaagttactaggtaacttcatattgctgagagaaatatggaacttacattgttcaattagaatagtgttctccccaaatatttataaaacttctcaagatactgctacgtgtaattttatatgaagataagtgtatttttcaataaagcatttataaattaaaaaaaaaaaaaaaaaa

SEQ ID NO: 300 - DNA, 424 bp, Homo sapiens
  ref <308>: DATABASE ACCESSION NUMBER: AI306503
  ref <309>: DATABASE ENTRY DATE: 2001-06-18
tttctgatcttgctttgttgcccaggctggattgcagtgacacgattgcagctcactgctgcctcaatcccctgggccaagcagtcctcccacttcagcctgttggagtagctgggactacaggcacatgccaccatgctcggctaatgttttaatttttttttttgtagagacaggtctcgctgtgttgcccaggctggtctcaaactcctgggcccaagcgatcctctcaccttggccttccagagtgctgggattataataggcatgggccactgtgcccagttggaagtgcttatttgaagaatttcccatgctgttggttttgtagaaatgtgttgctttttgtaaagagcaaatgattggttccttccctggagtgggggaatgaggaggaatagaattaattcaatatttcagttag

SEQ ID NO: 301 - DNA, 527 bp, Homo sapiens
  ref <308>: DATABASE ACCESSION NUMBER: AI268420
  ref <309>: DATABASE ENTRY DATE: 2001-06-18
cttgactcggaaatgtccggtcgtggtaagcagggtggcaaggcgcgcgccaaggctaagtcgcgctcgtcgcgcgcggggctgcagttccccgtgggccgcgtgcaccggttgctccgcaagggcaactattcggagcgcgtgggcgccggcgccccggtctatctggccgcggtgctcgagtacttgactgccgagatcctggagcttgccggcaacgcggcgcgcgacaacaagaagacgcgcatcatcccgcgccacctgcagctggccatccgcaacgacgaggagctcaacaagctgctgggccgcgtgaccatcgcgcagggtggcgtcctgcccaacatccaggccgtactgctgcccaagaagacggagagccaccacaaggccaagggcaagtgaggccgtccgccgcccccggggcccctttgatggacataaaggctcttttcagagccacctaccatctcgagaaaagagccgcactgatcctgcagttctttataggccggaagcctgatcac

SEQ ID NO: 302 - DNA, 505 bp, Homo sapiens
  ref <308>: DATABASE ACCESSION NUMBER: AI201868
  ref <309>: DATABASE ENTRY DATE: 2001-06-18
tttttttttttggcaactctaaaaggattttaatggatttatgaaacccccagatttccttacagccacgagctgtgaatccacacatgccagcaacattgaatacacttttttttctgcctgggcacacttattctagtaaagagagtgtgatgacagaacaccttagacttcaacacgcatctgtgcttaaagaggataaaaaacaaagaacaaaatcaaacaagacaatgtatgagttgaaactactaaggttgattttctccaggtttctcaggatctgggcagcgttttgcttcctcttaatttggaacccttgctgtgtactctgactttttactgattagactgaggtgctggagacccactgttcatggcttgtggaggcactgcagctggctccatcttgctaatgtgtgtgatgaatcgaagacgaagttttaaagctggttttaagttacagataatcttctctacttgctctttcacgctgtcaccagtaaac

SEQ ID NO: 303 - DNA, 4613 bp, Homo sapiens
  ref <308>: DATABASE ACCESSION NUMBER: D87930
  ref <309>: DATABASE ENTRY DATE: 2001-06-18
atgaagatggcggacgcgaagcagaagcggaacgagcagctgaaacgctggatcggctccgagacggacctcgagcctccggtggtgaagcgccagaagaccaaggtgaagttcgacgatggcgccgtcttcctggctgcttgctccagcggcgacacggacgaggtcctcaagctgctgcaccgcggcgccgacatcaattacgccaatgtggacggactcactgccctgcaccaggcttgcattgatgacaatgttgatatggtgaagtttctggtagaaaatggagcaaatattaatcaacctgataatgaaggctggataccactacatgcagcagcttcctgtggatatcttgatattgcagagtttttgattggtcaaggagcacatgtaggggctgtcaacagtgaaggagatacacctttagatattgcggaggaggaggcaatggaagagctacttcaaaatgaagttaatcggcaaggggttgatatagaagcagctcgaaaggaagaagaacggatcatgcttagagatgccaggcagtggctaaatagtggtcatataaatgatgtccggcatgcaaaatctggaggtacagcacttcacgttgcagctgctaaaggctatacggaagttttaaaacttttaatacaggcaggctatgatgttaatattaaagactatgatggctggacacctcttcatgctgcagctcattggggtaaagaagaagcatgtcgaattttagtggacaatctgtgtgatatggagatggtcaacaaagtgggccaaacagcctttgatgtagcagatgaagacattttaggatatttagaagagttgcaaaagaaacaaaatctgctccatagtgaaaaacgggacaagaaatctccactaattgaatcaacagcaaatatggacaataatcagtcacagaagacctttaaaaacaaagagacgttgattattgaaccagagaaaaatgcatcccgtattgaatctctggaacaagaaaaggttgatgaagaagaagaaggaaagaaggatgagtctagctgctctagtgaagaagatgaggaagatgactcggaatcagaagctgaaacagataagacaaaacccctggcttctgtaactaatgccaacacttctagtacacaagcagctcctgtagctgttacaacacctactgtgtcatcaggtcaagcaacacctacatcacctattaaaaagtttccaaccacagctacaaaaatttctcccaaagaagaagagagaaaagatgagtctcctgcaacttggaggttaggacttagaaagacgggcagctatggtgcacttgctgaaatcacagcatctaaagagggtcagaaagaaaaagatactgcaggtgttacacgttcagcttcaagtcccagactttcctcctctttggataataaagaaaaggagaaagatagtaaaggaactaggcttgcatatgttgcacctacaataccaagacgactagccagtacatctgacattgaagagaaagaaaacagagattcttcaagtttgcgaacaagtagttcatatacaaggagaaaatgggaagatgatcttaaaaaaaatagctcagttaatgaaggatcaacgtatcataaaagttgctcctttggtagaagacaagatgatttgattagttctagtgttccaagcaccacatcaacaccaacagttacctctgcagctgggcttcagaaaagcctgctttccagcacaagcactactacaaagattacaacgggttcttcctcagcaggcacacaaagcagtacctcaaatcgtttgtgggctgaggatagtactgagaaagaaaaggacagtgttcctacggcagtgaccattcctgttgctccaactgttgtaaatgctgcagcttctaccacaaccctgactacaactactgctggcactgtctcctccacaacagaggtcagggagagacgcagatcatacctcactcctgttagggatgaagagtctgaatcccaaagaaaagcaagatctagacaagcaagacaatctagaagatcaacacagggagtgacattaactgatcttcaagaagctgagaaaacaataggaagaagtcgttctacccgaaccagagaacaagaaaatgaagaaaaagaaaaagaggaaaaagagaaacaagataaagagaaacaagaagaaaagaaggagtcagaaacatctagagaagatgaatataaacaaaagtactccagaacgtatgatgagacttaccagcgttataggccagtatcaacttcaagttcaaccactccatcctcttcactttctactatgagcagttcactgtatgcttcaagtcaactaaacaggccaaatagtcttgtaggcataacttctgcttactccagaggaataacaaaagaaaatgaaagagagggagaaaaaagagaagaggagaaagaaggagaagataaatcacaacctaaatcaatcagagaacgacgacgaccaagagagaaaagaagatctacaggagtttcattttggacacaagatagtgatgaaaatgaacaagaacaacaatcagacacagaagagggatccaataagaaagaaactcagacggattccatttctagatatgaaaccagttctacatcagctggtgatcgatatgattccttgctgggtcgctctggatcatacagttacttagaagaaagaaaaccttacagcagcaggctagaaaaggatgactcaactgactttaaaaagctttatgaacaaattctagctgaaaatgaaaagctgaaggcacagctacatgatacaaatatggaactaacagatcttaaattacagttggaaaaggccacccagagacaagaaagatttgctgatagatcactgttggaaatggaaaaaagggaacgaagagctctagaaagaagaatatctgaaatggaagaagagctcaaaatgttaccagacctaaaagcagacaaccagaggctaaaggatgaaaatggggccttgatcagagttataagcaaactttccaaataaaaaaaaaaaagcagcaagtaatggaattgcacatattagtaacccagtggaccataattggcagtcactggaagtctgggaagaatccttggagactgtcattttcggatatcctgccaaatgccctcttatctagaatttttgtttcattttgtttaattttctggggtgtttttgttgttgttggtttgttttttgtttttttttttaatcaagaccattgtttcatgttaatgcagctgctgagaagatttttttttaatgactgagaaaacttgtttacagctccagcatataaggaaagtgttcaaggccagatatgcctcagatatttaaccagtaagccttagttgtacataaatacttttgtgtcaacaaaaactttcagctctcacagaagacagttactcaacattttttgatgtgccacagtttcgagtttttcgatatttaaattttttggcttttcatctaagtttgggtttgtattttttccttctaaactcttcatgtggcagagtcttctatgttttcacggctttttcattacagaaaagaacacttgctcttctgtgattattgtcatgtattaggctaatgctgtgttgtctcccacctggaactgaattgcttggtggaacatatgctttcactgtttgtgcaatatgcatttatttcttatatgaatgctttaaagtcatttgaggttagatcttttaattcctattttctgcttcattggtcactttttttttattgtagtataagatgttagattctgtaatcttcacattcattttagcaggtactgagtgatgctgtatatacaaataagtgtattgttttgatttttagaccaccacatggcatgcttgactatttcttatttcaaatgtctgctaatgcagagtaggctactccatgatagtgttaaaaaacaaaatttgctaacaatgtgatataaagactttaaaagttacacattatgtggagccctatctttacaaaagtttcctactgtaaagtgcttttattttcagttttcatttgatagtactcaaccataattaaagttgcataagataattgctttacatttcacatacctatatttatctgagtgctgtctaaaactgttgtgctagccaaagtaatgctatgaaatcatttgcagaattaacccgtgagttaatgttaaatgcactgttattgccatgtgaagaggcatcgactttgataccaccatcatgttcagaccattttatacatttcagtggcctttttttttttaaggaaaaaaaagcgcaaaaccaagtacatagtgacgatggcttttatttggacaaatagcttttatattttcattaaaccatgcaaaaaatactacatctttctggcacataactgtctccttaaccactggaacagttcagccatttgaataaattgtacattgtaaagcttatagtagctgattgtattattgattgtattgtatactatattaaatgtgaatttgt

SEQ ID NO: 304 - DNA, 1891 bp, Homo sapiens
  ref <308>: DATABASE ACCESSION NUMBER: AF017995
  ref <309>: DATABASE ENTRY DATE: 2001-06-18
ccgcttcggggaggaggacgctgaggaggcgccgagccgcgcagcgctgcgggggaggcgcccgcgccgacgcggggcccatggccaggaccaccagccagctgtatgacgccgtgcccatccagtccagcgtggtgttatgttcctgcccatccccatcaatggtgaggacccagactgagtccagcacgccccctggcattcctggtggcagcaggcagggccccgccatggacggcactgcagccgagcctcggcccggcgccggctccctgcagcatgcccagcctccgccgcagcctcggaagaagcggcctgaggacttcaagtttgggaaaatccttggggaaggctctttttccacggttgtcctggctcgagaactggcaacctccagagaatatgcgattaaaattctggagaagcgacatatcataaaagagaacaaggtcccctatgtaaccagagagcgggatgtcatgtcgcgcctggatcaccccttctttgttaagctttacttcacatttcaggacgacgagaagctgtatttcggccttagttatgccaaaaatggagaactacttaaatatattcgcaaaatcggttcattcgatgagacctgtacccgattttacacggctgagatcgtgtctgctttagagtacttgcacggcaagggcatcattcacagggaccttaaaccggaaaacattttgttaaatgaagatatgcacatccagatcacagattttggaacagcaaaagtcttatccccagagagcaaacaagccagggccaactcattcgtgggaacagcgcagtacgtttctccagagctgctcacggagaagtccgcctgtaagagttcagacctttgggctcttggatgcataatataccagcttgtggcaggactcccaccattccgagctggaaacgagtatcttatatttcagaagatcattaagttggaatatgactttccagaaaaattcttccctaaggcaagagacctcgtggagaaacttttggttttagatgccacaaagcggttaggctgtgaggaaatggaaggatacggacctcttaaagcacacccgttcttcgagtccgtcacgtgggagaacctgcaccagcagacgcctccgaagctcaccgcttacctgccggctatgtcggaagacgacgaggactgctatggcaattatgacaatctcctgagccagtttggctgcatgcaggtgtcttcgtcctcctcctcacactccctgtcagcctccgacacgggcctgccccagaggtcaggcagcaacatagagcagtacattcacgatctggactcgaactcctttgaactggacttacagttttccgaagatgagaagaggttgttgttggagaagcaggctggcggaaacccttggcaccagtttgtagaaaataatttaatactaaagatgggcccagtggataagcggaagggtttatttgcaagacgacgacagctgttgctcacagaaggaccacatttatattatgtggatcctgtcaacaaagttctgaaaggtgaaattccttggtcacaagaacttcgaccagaggccaagaattttaaaactttctttgtccacacgcctaacaggacgtattatctgatggaccccagcgggaacgcacacaagtggtgcaggaagatccaggaggtttggaggcagcgataccagagccacccggacgccgctgtgcagtgacgtggcctgcggccgggctgcccttcgctgccaggacacctgccccagcgcggcttggccgccatccgggacgcttccagaccacctgccagccatcacaaggggaacgcagaggcggaaaccttgcagcatttttattt

SEQ ID NO: 305 - DNA, 9090 bp, Homo sapiens
  ref <308>: DATABASE ACCESSION NUMBER: Y00285
  ref <309>: DATABASE ENTRY DATE: 2001-06-18
cgagcccagtcgagccgcgctcacctcgggctcccgctccgtctccacctccgcctttgccctggcggcgcgaccccgtcccggcgcggcccccagcagtcgcgcgccgttagcctcgcgcccgccgcgcagtccgggcccggcgcgatgggggccgccgccggccggagcccccacctggggcccgcgcccgcccgccgcccgcagcgctctctgctcctgctgcagctgctgctgctcgtcgctgccccggggtccacgcaggcccaggccgccccgttccccgagctgtgcagttatacatgggaagctgttgataccaaaaataatgtactttataaaatcaacatctgtggaagtgtggatattgtccagtgcgggccatcaagtgctgtttgtatgcacgacttgaagacacgcacttatcattcagtgggtgactctgttttgagaagtgcaaccagatctctcctggaattcaacacaacagtgagctgtgaccagcaaggcacaaatcacagagtccagagcagcattgccttcctgtgtgggaaaaccctgggaactcctgaatttgtaactgcaacagaatgtgtgcactactttgagtggaggaccactgcagcctgcaagaaagacatatttaaagcaaataaggaggtgccatgctatgtgtttgatgaagagttgaggaagcatgatctcaatcctctgatcaagcttagtggtgcctacttggtggatgactccgatccggacacttctctattcatcaatgtttgtagagacatagacacactacgagacccaggttcacagctgcgggcctgtccccccggcactgccgcctgcctggtaagaggacaccaggcgtttgatgttggccagccccgggacggactgaagctggtgcgcaaggacaggcttgtcctgagttacgtgagggaagaggcaggaaagctagacttttgtgatggtcacagccctgcggtgactattacatttgtttgcccgtcggagcggagagagggcaccattcccaaactcacagctaaatccaactgccgctatgaaattgagtggattactgagtatgcctgccacagagattacctggaaagtaaaacttgttctctgagcggcgagcagcaggatgtctccatagacctcacaccacttgcccagagcggaggttcatcctatatttcagatggaaaagaatatttgttttatttgaatgtctgtggagaaactgaaatacagttctgtaataaaaaacaagctgcagtttgccaagtgaaaaagagcgatacctctcaagtcaaagcagcaggaagataccacaatcagaccctccgatattcggatggagacctcaccttgatatattttggaggtgatgaatgcagctcagggtttcagcggatgagcgtcataaactttgagtgcaataaaaccgcaggtaacgatgggaaaggaactcctgtattcacaggggaggttgactgcacctacttcttcacatgggacacggaatacgcctgtgttaaggagaaggaagacctcctctgcggtgccaccgacgggaagaagcgctatgacctgtccgcgctggtccgccatgcagaaccagagcagaattgggaagctgtggatggcagtcagacggaaacagagaagaagcattttttcattaatatttgtcacagagtgctgcaggaaggcaaggcacgagggtgtcccgaggacgcggcagtgtgtgcagtggataaaaatggaagtaaaaatctgggaaaatttatttcctctcccatgaaagagaaaggaaacattcaactctcttattcagatggtgatgattgtggtcatggcaagaaaattaaaactaatatcacacttgtatgcaagccaggtgatctggaaagtgcaccagtgttgagaacttctggggaaggcggttgcttttatgagtttgagtggcgcacagctgcggcctgtgtgctgtctaagacagaaggggagaactgcacggtctttgactcccaggcagggttttcttttgacttatcacctctcacaaagaaaaatggtgcctataaagttgagacaaagaagtatgacttttatataaatgtgtgtggcccggtgtctgtgagcccctgtcagccagactcaggagcctgccaggtggcaaaaagtgatgagaagacttggaacttgggtctgagtaatgcgaagctttcatattatgatgggatgatccaactgaactacagaggcggcacaccctataacaatgaaagacacacaccgagagctacgctcatcacctttctctgtgatcgagacgcgggagtgggcttccctgaatatcaggaagaggataactccacctacaacttccggtggtacaccagctatgcctgcccggaggagcccctggaatgcgtagtgaccgacccctccacgctggagcagtacgacctctccagtctggcaaaatctgaaggtggccttggaggaaactggtatgccatggacaactcaggggaacatgtcacgtggaggaaatactacattaacgtgtgtcggcctctgaatccagtgccgggctgcaaccgatatgcatcggcttgccagatgaagtatgaaaaagatcagggctccttcactgaagtggtttccatcagtaacttgggaatggcaaagaccggcccggtggttgaggacagcggcagcctccttctggaatacgtgaatgggtcggcctgcaccaccagcgatggcagacagaccacatataccacgaggatccatctcgtctgctccaggggcaggctgaacagccaccccatcttttctctcaactgggagtgtgtggtcagtttcctgtggaacacagaggctgcctgtcccattcagacaacgacggatacagaccaggcttgctctataagggatcccaacagtggatttgtgtttaatcttaatccgctaaacagttcgcaaggatataacgtctctggcattgggaagatttttatgtttaatgtctgcggcacaatgcctgtctgtgggaccatcctgggaaaacctgcttctggctgtgaggcagaaacccaaactgaagagctcaagaattggaagccagcaaggccagtcggaattgagaaaagcctccagctgtccacagagggcttcatcactctgacctacaaagggcctctctctgccaaaggtaccgctgatgcttttatcgtccgctttgtttgcaatgatgatgtttactcagggcccctcaaattcctgcatcaagatatcgactctgggcaagggatccgaaacacttactttgagtttgaaaccgcgttggcctgtgttccttctccagtggactgccaagtcaccgacctggctggaaatgagtacgacctgactggcctaagcacagtcaggaaaccttggacggctgttgacacctctgtcgatgggagaaagaggactttctatttgagcgtttgcaatcctctcccttacattcctggatgccagggcagcgcagtggggtcttgcttagtgtcagaaggcaatagctggaatctgggtgtggtgcagatgagtccccaagccgcggcgaatggatctttgagcatcatgtatgtcaacggtgacaagtgtgggaaccagcgcttctccaccaggatcacgtttgagtgtgctcagatatcgggctcaccagcatttcagcttcaggatggttgtgagtacgtgtttatctggagaactgtggaagcctgtcccgttgtcagagtggaaggggacaactgtgaggtgaaagacccaaggcatggcaacttgtatgacctgaagcccctgggcctcaacgacaccatcgtgagcgctggcgaatacacttattacttccgggtctgtgggaagctttcctcagacgtctgccccacaagtgacaagtccaaggtggtctcctcatgtcaggaaaagcgggaaccgcagggatttcacaaagtggcaggtctcctgactcagaagctaacttatgaaaatggcttgttaaaaatgaacttcacggggggggacacttgccataaggtttatcagcgctccacagccatcttcttctactgtgaccgcggcacccagcggccagtatttctaaaggagacttcagattgttcctacttgtttgagtggcgaacgcagtatgcctgcccacctttcgatctgactgaatgttcattcaaagatggggctggcaactccttcgacctctcgtccctgtcaaggtacagtgacaactgggaagccatcactgggacgggggacccggagcactacctcatcaatgtctgcaagtctctggccccgcaggctggcactgagccgtgccctccagaagcagccgcgtgtctgctgggtggctccaagcccgtgaacctcggcagggtaagggacggacctcagtggagagatggcataattgtcctgaaatacgttgatggcgacttatgtccagatgggattcggaaaaagtcaaccaccatccgattcacctgcagcgagagccaagtgaactccaggcccatgttcatcagcgccgtggaggactgtgagtacacctttgcctggcccacagccacagcctgtcccatgaagagcaacgagcatgatgactgccaggtcaccaacccaagcacaggacacctgtttgatctgagctccttaagtggcagggcgggattcacagctgcttacagcgagaaggggttggtttacatgagcatctgtggggagaatgaaaactgccctcctggcgtgggggcctgctttggacagaccaggattagcgtgggcaaggccaacaagaggctgagatacgtggaccaggtcctgcagctggtgtacaaggatgggtccccttgtccctccaaatccggcctgagctataagagtgtgatcagtttcgtgtgcaggcctgaggccgggccaaccaataggcccatgctcatctccctggacaagcagacatgcactctcttcttctcctggcacacgccgctggcctgcgagcaagcgaccgaatgttccgtgaggaatggaagctctattgttgacttgtctccccttattcatcgcactggtggttatgaggcttatgatgagagtgaggatgatgcctccgataccaaccctgatttctacatcaatatttgtcagccactaaatcccatgcacgcagtgccctgtcctgccggagccgctgtgtgcaaagttcctattgatggtccccccatagatatcggccgggtagcaggaccaccaatactcaatccaatagcaaatgagatttacttgaattttgaaagcagtactccttgcttagcggacaagcatttcaactacacctcgctcatcgcgtttcactgtaagagaggtgtgagcatgggaacgcctaagctgttaaggaccagcgagtgcgactttgtgttcgaatgggagactcctgtcgtctgtcctgatgaagtgaggatggatggctgtaccctgacagatgagcagctcctctacagcttcaacttgtccagcctttccacgagcacctttaaggtgactcgcgactcgcgcacctacagcgttggggtgtgcacctttgcagtcgggccagaacaaggaggctgtaaggacggaggagtctgtctgctctcaggcaccaagggggcatcctttggacggctgcaatcaatgaaactggattacaggcaccaggatgaagcggtcgttttaagttacgtgaatggtgatcgttgccctccagaaaccgatgacggcgtcccctgtgtcttccccttcatattcaatgggaagagctacgaggagtgcatcatagagagcagggcgaagctgtggtgtagcacaactgcggactacgacagagaccacgagtggggcttctgcagacactcaaacagctaccggacatccagcatcatatttaagtgtgatgaagatgaggacattgggaggccacaagtcttcagtgaagtgcgtgggtgtgatgtgacatttgagtggaaaacaaaagttgtctgccctccaaagaagttggagtgcaaattcgtccagaaacacaaaacctacgacctgcggctgctctcctctctcaccgggtcctggtccctggtccacaacggagtctcgtactatataaatctgtgccagaaaatatataaagggcccctgggctgctctgaaagggccagcatttgcagaaggaccacaactggtgacgtccaggtcctgggactcgttcacacgcagaagctgggtgtcataggtgacaaagttgttgtcacgtactccaaaggttatccgtgtggtggaaataagaccgcatcctccgtgatagaattgacctgtacaaagacggtgggcagacctgcattcaagaggtttgatatcgacagctgcacttactacttcagctgggactcccgggctgcctgcgccgtgaagcctcaggaggtgcagatggtgaatgggaccatcaccaaccctataaatggcaagagcttcagcctcggagatatttattttaagctgttcagagcctctggggacatgaggaccaatggggacaactacctgtatgagatccaactttcctccatcacaagctccagaaacccggcgtgctctggagccaacatatgccaggtgaagcccaacgatcagcacttcagtcggaaagttggaacctctgacaagaccaagtactaccttcaagacggcgatctcgatgtcgtgtttgcctcttcctctaagtgcggaaaggataagaccaagtctgtttcttccaccatcttcttccactgtgaccctctggtggaggacgggatccccgagttcagtcacgagactgccgactgccagtacctcttctcttggtacacctcagccgtgtgtcctctgggggtgggctttgacagcgagaatcccggggacgacgggcagatgcacaaggggctgtcagaacggagccaggcagtcggcgcggtgctcagcctgctgctggtggcgctcacctgctgcctgctggccctgttgctctacaagaaggagaggagggaaacagtgataagtaagctgaccacttgctgtaggagaagttccaacgtgtcctacaaatactcaaaggtgaataaggaagaagagacagatgagaatgaaacagagtggctgatggaagagatccagctgcctcctccacggcagggaaaggaagggcaggagaacggccatattaccaccaagtcagtgaaagccctcagctccctgcatggggatgaccaggacagtgaggatgaggttctgaccatcccagaggtgaaagttcactcgggcaggggagctggggcagagagctcccacccagtgagaaacgcacagagcaatgcccttcaggagcgtgaggacgatagggtggggctggtcaggggtgagaaggcgaggaaagggaagtccagctctgcacagcagaagacagtgagctccaccaagctggtgtccttccatgacgacagcgacgaggacctcttacacatctgactccgcagtgcctgcaggggagcacggagccgcgggacagccaagcacctccaaccaaataagacttccactcgatgatgcttctataattttgcctttaacagaaactttcaaaagggaagagtttttgtgatgggggagagggtgaaggaggtcaggccccactccttcctgattgtttacagtcattggaataaggcatggctcagatcggccacagggcggtaccttgtgcccagggttttgccccaagtcctcatttaaaagcataaggccggacgcatctcaaaacagagggctgcattcgaagaaacccttgctgctttagtcccgatagggtatttgaccccgatatattttagcattttaattctctccccctatttattgactttgacaattactcaggtttgagaaaaaggaaaaaaaaacagccaccgtttcttcctgccagcaggggtgtgatgtaccagtttgtccatcttgagatggtgaggctgtcagtgtatggggcagcttccggcgggatgttgaactggtcattaatgtgtcccctgagttggagctcattctgtctcttttctcttttgctttctgtttcttaagggcacacacacgtgcgtgcgagcacacacacacatacgtgcacagggtccccgagtgcctaggttttggagagtttgcctgttctatgcctttagtcaggaatggctgcacctttttgcatgatatcttcaagcctgggcgtacagagcacatttgtcagtatttttgccggctggtgaattcaaacaacctgcccaaagattgatttgtgtgtttgtgtgtgtgtgtgtgtgtgtgtgtgtgtgtgagtggagttgaggtgtcagagaaaatgaattttttccagatttggggtataggtctcatctcttcaggttctcatgataccacctttactgtgcttatttttttaagaaaaaagtgttgatcaaccattcgacctataagaagccttaatttgcacagtgtgtgacttacagaaactgcatgaaaaatcatgggccagagcctcggccctagcattgcacttggcctcatgctggagggaggctgggcgggtacagcgcggaggaggagggaggccaggcgggcatggcgtggaggaggagggaggccgggcggtcacagcatggaggaggagggaggcgctgctggtgttcttattctggcggcagcgcctttcctgccatgtttagtgaatgacttttctcgcattgtagaattgtatatagactctggtgttctattgctgagaagcaaaccgccctgcagcatccctcagcctgtaccggtttggctggcttgtttgatttcaacatgagtgtattttttaaaattgatttttctcttcatttttttttcaatcaactttactgtaatataaagtattcaacaatttcaataaaagataaattattaaaa

SEQ ID NO: 306 - DNA, 7176 bp, Homo sapiens
  ref <308>: DATABASE ACCESSION NUMBER: AB014511
  ref <309>: DATABASE ENTRY DATE: 2001-06-18
gcggatggacagcaggccccgcgccgggtgctgcgagtggctgagatgctgcggtggaggggaggccaggccccgcactgtctggctggggcaccccgagaagagagaccagaggtatcctcggaatgtcatcaacaatcagaagtacaatttcttcacctttcttcctggggtgctgttcaaccagttcaaatactttttcaacctctatttcttacttcttgcctgctctcagtttgttcccgaaatgagacttggtgcactctatacctactgggttcccctgggcttcgtgctggccgtcactgtcatccgtgaggcggtggaggagatccgatgctacgtgcgggacaaggaagtcaactcccaggtctacagccggctcacagcacgaggtactgttgtgggtgttgttctttacactggcagagaactccggagtgtcatgaatacctcaaatccccgaagtaagatcggcctgttcgacttggaagtgaactgcctcaccaagatcctctttggtgccctggtggtggtctcgctggtcatggttgcccttcagcactttgcaggccgttggtacctgcagatcatccgcttcctcctcttgttttccaacatcatccccattagtttgcgcgtgaacctggacatgggcaagatcgtgtacagctgggtgattcgaagggactcaaaaatccccgggaccgtggttcgctccagcacgattcctgagcagctgggcaggatttcgtacttactcacagacaagacaggcactcttacccagaacgagatgattttcaaacggctccatctcggaacagtagcctacggcctcgactcaatggacgaagtacaaagccacattttcagcatttacacccagcaatcccaggacccaccggctcagaagggcccaacgctcaccactaaggtccggcggaccatgagcagccgcgtgcacgaagccgtgaaggccatcgcgctctgccacaacgtgactcccgtgtatgagtccaacggtgtgactgatcaggctgaggccgagaagcagtacgaagactcctgccgcgtataccaggcatccagccccgatgaggtggccctggtacagtggacggaaagtgtgggcttaaccctggtgggccgagaccagtcttccatgcagctgaggacccctggcgaccagatcctgaacttcaccatcctacagatcttccctttcacctatgaaagcaaacgtatgggcatcatcgtgcgggatgaatcaactggagaaattacgttttacatgaagggagcagatgtggtcatggctggcattgtgcagtacaatgactggttggaggaagagtgtggcaacatggcccgagaagggctgcgggtgctcgtggtggcaaagaagtctcttgcagaggagcagtatcaggactttgaagcccgctacgtccaggccaagctgagtgtgcacgaccgctccctcaaagtggccacggtgatcgagagcctggagatggagatggaactgctgtgcctgacgggcgtggaggaccagctgcaggcagatgtgcggcccacgctggagaccctgaggaatgctggcatcaaggtttggatgctgacaggggacaagctggagacagctacgtgcacagcgaagaatgcacatctggtgaccagaaaccaagacatccacgtttttcggctggtgaccaaccgcggggaggctcacctcgagctgaacgccttccgcaggaagcatgattgtgccctggtcatctcgggagactccctggaggtttgcctcaagtactatgagtacgagttcatggagctggcctgccagtgcccggccgtagtctgctgccgatgtgcccccacccagaaggcccagatcgtgcgcctgcttcaggagcgcacgggcaagctcacctgtgcagtaggggacggaggcaatgacgtcagcatgattcaggaatctgactgcggcgtgggagtggaaggaaaggaaggaaaacaggcttcgttggctgcagacttctccatcactcaatttaagcatcttggccggttgcttatggtgcatggccggaacagctacaagcggtcagccgccctcagccagttcgtgattcacaggagcctctgtatcagcaccatgcaggctgtcttttcctccgtgttttactttgcctccgtccctctctatcaaggattcctcatcattgggtactccacaatttacaccatgtttcctgtgttttctctggtcctggacaaagatgtcaaatcggaagttgccatgctgtatcctgagctctacaaggatcttctcaagggacggccgttgtcctacaagacattcttaatatgggttttgattagcatctatcaagggagcaccatcatgtacggggcgctgctgctgtttgagtcggagttcgtgcacatcgtggccatctccttcacctcgctgatcctcaccgagctgctcatggtggcgctgaccatccagacctggcactggctcatgacagtggcggagctgctcagcctggcctgctacatcgcctccctggtgttcttacacgagttcatcgatgtgtacttcatcgccaccttgtcattcttgtggaaagtctccgtcatcactctggtcagctgcctccccctctatgtcctcaagtacctgcgaagacggttctctccccccagctactcaaagctcacatcataggccgtgcgttcgctggagggggccctggtcttggcgcttccctgatggacagagctcaagttccatttatattaaccgccacctgtggattttgcagtaattgctaacacatgcagttttaatgggaagcggctctgcgcctaaacggagtcctaacgctgcatcaacgggagggagggtcctgaaagagacccatctgggcctgtctgaacccctcgttcttcatgtttaggtgaatatgaatatgttaaagctggtggctcagctgggagatttatatgggtcactgtgcgagcttccttatgacttgaattttgttgtcacatgataaaagtttctgtgtagctgaaggttgtagaaggcttgtgtgtgtgtgtgtgtgtgtgtgtgtgtgtgtgtgtgtgtttttaaagagtcctaatgtgtatgtactctttatgtctttcttgctcttacaaagaggtgtcagaaaaatagaaagctcttggtgtcggtttgggaggaaaagacagtgacatttggtaaaaagttatccacacaataatctccattcggaaatgctcagtatcgtctccagccagccctgcttatccaggttacactggattcctgggatcgtaaccagtaaatgagaggagagggagagagagtgtcctaagtccaatctgttatccttgatctgattcagcatccatagtgtgtgagttaacttcacctgccacctcgtaaaagaatttcagaggtgtgatcccgctttattgggacctggtaacaatcacaaagccagtggctgtttgagaaggacctcagacattttcagcagagttgttttagcaggaaacgtgccactgaatggcccctaaatgtgtcgacagtgtgataagagactcaactaattctttaggcaacatggcagatgtgactcagatcctccaagaccaaagcggaaaggtcagggggctgggactcttctcttccatagaagcctgtttcctgttaggaggcataatggaagatgaccccacaaaggcagaggcatctttcggaacaacactggtggcagctttcagaacaaggaacccctggtgggaggacgcccaagctacagcgttgggatctgggatctgttccactgccggcagatttcaaggggaacttgctgaaaggcagccagtggtgaagatttctcccctcccaggatggactacatgccggcatgtttcttataaagctgtggctgcttgtttcagaggaagggagtttgcagtcgcgggacgtggtagagcaaggcattcttgggttttcaagttgcttcttgcagaagccacatatgcatgccataagggttaagttggtggatctttaagagccaagtgtggttgagatcttggatttgcgtttacttcttgatgaatacatatccttcaaaccctctgcctggcgctacttctgtgtgcttcagagaggtacatcacagcctggtttctgatgcctactaactcctgctcttggagagctggagacacgaggatcagatagtcccttgcctttggagcactcttgataagcttttgtattttgtgttgtccttttaaaatgttctagaatgactttacgttgcaggtactggttaattggctgttgacaccacatctattttgtcttatgattctgcagttttgcagtacttttctctatctgattcagccatttctgccagagggaaaaggtcggcagaaaagatgtattgagtgaatagttaaggataggatctttgtccaaaaatttcagaaagattgagcaaatctgacgtattcattgagtgagtttctgtgttttcaaaggtggaggagaaatttgtgctggaagtttttaagcctccgttttcttggaaatcagtctgtaacactggcaagtcttaagatagtcccgtttagactttgcagatgctgaacctggctctgtaacgctgggaagtcttaagatagtcctgtttagactttgcaaaccctgtacctggctttgctcggagattcgggatgctggctcctgcaggcagggcgtgtgggagcctcgtcagaaagttttagaggtttccagcagaagcagaatgaagatggtctccctggccttttccttaattctcaattttgattgaggtgcacaagttgacttttaaagccaacgcttaagatactgattgacatcttcaagggagaatgctcccaggaggggctgaagaagccatagttggaagtggaaggtactcgtcagtgttctccacaaacctttttactctgttgtctcagccgcactggggcggaggcggtcaagggtgagaagtaccgacactcaagtgcaaactgccacgtcgttggcccatcccatcagtgggcagctggctgacgccattcactggacggtccctgaacacctaggaatgcacacaccgtgcttctcagacactggagacgcaaaggcaggaggatgcagtccggtgagaggacacgatctttacctgcacaatcagactgtaagcccagcagagaaccccaggggcgcctgggtacttctcggaggtcatcttagttgtggtggggaagacaaagaaataagcaaacaagaaactagagttactatacaagaaactctcctgagtttgtaaaccttaagcataaggattcagttgacctttttcttggttcatcaatctggaaagaacttacataaagcgccattgacactgtcacctgggagctccatgggccgtaagtctttgacagccaatttaatttgaggtcagagggccttgaggtacacagtcagcactgtttgaacacttttcctgaaagcaaaactcacagctccctgcgccctctgacaacactagctatttctgccagagtaagaacttctattactattttattattgttcatatgtcttttgatgatggttgtgtgacagggggaagcaggatctatttggtttcttccccctccccccaccccttcctttttgtctctctttttttttctctaagaaaatcaccagactagtttttccatcttgagtaatttcttatgtgggacagttttgatcctcattttgaaagcatgcgtgcgcacatgtgtgttgcctgtggtgccaggtgagacaggtggcactaactccagctgcttggaaggcatcccaagggcgcatcttaaagttggagcagacctcccttttccagcccctggggccattagaccacgtgctggaactagcattgtaaaattcccatcccagttccactcccctgaagtgaaacccttttttttttgtgacagtaaatcttaaaaatcattgtctctttatgaacatttcctcagtttcttctctgctgaaaatgtaagccatgctactttttaatgtattttgaattttgtgctcattggaaattgatatgctaatgcctcccccaccccccgccagacttttctttttatactttgtcttgtttttactggggtaggctgggcatgcgtgcgtgcctttagggcagcattttaaacctttgccaaaattgcaaatgggacatgtacattcttctgctccatcctacttaaacacctatcagctatttttatctttaaccttttctgtatgtttgaagtgtgtggggggtgtgtgtgtgtgtgaaagagcgagagaatgatgtcatctaaagttttttgaagaattatttggttttcattgcattaaaattctatcactcccagctttgttttcatttaaaaaaatatacaaagagctttgtaaatacaacacattttatttctcccccttcttttaatgtacagcttttttgccacttatatatacttaaaatattcccatgaattatgtccagttcttcttggaaaaaaatttggttttgaatgaacctgcaaagcatcctgcagcgtgagcagctcctccacctggagctccgaagcatcttctcaggccaaagcggcattacccgtgaatctgtcttctccgccacagcatggtttgaggcgcagtctgttaatatagctgggccatgtcagtgactgttgtgtttgtggggtcaggtggggggcatggtatttgcaaaaaaaacaaattatggctaatttattattttgttgcagtggggttaactgtaaactcatgtaagagtctgtgatttcctcattggttgatctctctctctgtaatcctcattgcaaattttcaccaggacagcgttttttgattagaggggagctctggcacagtatgctttaatttagcaggaacttccagatgatttaaattctcgatgctgtgatgacacacatatgatctttcgtgtttctgagcgactctactttcattgtttgccagcgtggctcgttgctgttgcccaataaagcttgtgtacgttc

SEQ ID NO: 307 - DNA, 1404 bp, Homo sapiens
  ref <308>: DATABASE ACCESSION NUMBER: AF052169
  ref <309>: DATABASE ENTRY DATE: 2001-06-18
aaatcgacagttttattcttagactcatgtgatccaagctgtatataccatatataaacattttacatgaatcatttagttttttaattcatttactaatgctataaaatttcctatattaccccagtaatttgcatcagctggtttatatactaaagcaacatgttttgatgagtttcttacatccttatcgaggaattgggttaggaaaaaatacataattgtaaaactgagtttgctgtattatacttttttcttgagtattagttgtattactaatcatatgttgattaactgtctacttaaagtcaaggtacctgtatttttaatccactaatttttttttagttgggaaatagatttcaggtcttttattagactaacattttttgagaagtaaaattgacttcatatacaaagcctgtaattttaggcgaaatggaagcagaaatctaggaagttgtgcttgcttgtatgttgagtttggtctcagactaagtaatgcatcagaattcatctgtttgaagcctgaaataatttaggactctgattcactgaccaaaagtcagtgtttcagagatttctctaccccgtatggtattttgttagattgttcaacaggaagcacatgattgagaacatcttgggacagaccaaaaccactgacagatggcaaggctcggcgattctgatttcccttctcaaatctgctcaactccaagagtcttgagaaactgctaaaattttgcctctgtcactcaagtcttacaaatgttatcttgtaaacctttgaggtgaactattccactgtcttgtacataggcatcttattcactgcaccctgtcacacccagcaccccccgccccgcacattatttgaaagactgggaatttaatggttagggacagtaaatctacttctttttccagggacgactgtcccctctaaagttaaagtcaatacaagaaaactgtctatttttagcctaaagtaaaggctgtgaagaaaattcattttacattgggtagacagtaaaaaacaagtaaaataacttgacatgagcacctttagatcccttcccctccatgggctttgggccacagaatgaacctttgaggcctgtaaagtggattgtaatttcctataagctgtaatagtggaggtattgtgggttcatttgagtaagccctccaaagataccattcaaataacctgggagaatgtcataaattattcagataattaacactgcatgaatctgattcagaggcatgcatttacatatgttgccctaattaccatttgatgatcataaatacaagtgaatgacattggacttttagtaacaaacttaatttttaaaaaggtgtagacaatggtggttaaaaaaaaaaaaaaaaaaa

SEQ ID NO: 308 - DNA, 601 bp, Homo sapiens
  Modified_base 1 ... 601: n = a,c,g, or t
  ref <308>: DATABASE ACCESSION NUMBER: AI344106
  ref <309>: DATABASE ENTRY DATE: 2001-06-18
cctacaagttccatatcaaaaaatgaatgtaaacttttcatgcagttttacacattgaaaatgcaggttattttaattccattccatttttcagaattctcaatcacaatcctctgacaactgttgaagatccgtatctctttaaattgccagcattaaaatatctgtaagtactatagtactctcatgagtcaagagatgatttatgctttttaaatttttcatcaaagcttaagtattttgcatttaggctaaaatgtcataatttaaattttaactgggttattgaaaaaaagttattggcgaagaaaaaaattaagaggatgtataatggtcaagacagccagcaggggaagagaacagcattgaagaacccatatagatttggaacatgtagacacatggaggaatattatttaaccaagaaagcaaaggggaaaaggtgttcattattctaaaaataaagaaaagagtaaataagatggtgagtgcaatatgaaaatgagaagataatggtaaaaaaaaaagtgtcagttctgctcttgagtatcattaatttgatgatgcanatcaacttttaatttctttaataagagctccc

SEQ ID NO: 309 - DNA, 532 bp, Homo sapiens
  ref <308>: DATABASE ACCESSION NUMBER: AI693930
  ref <309>: DATABASE ENTRY DATE: 2001-06-18
ttttcatgtttcattctacctatgtaatcattttatttctgtgtaaaatttccttgtgttgagtggtagctgatagtgtctaaccagaggctaattttagacagagagccatattttacatctattattatttcagctagacgaaaacacagaaattgagtgggtgctggaacacatccattatttgccccgtagagataaatggagtagttgagaatagtgcaccgttggcagaatatggtgggaaaacgtgcacattggcttcccacgaggacctattttgtactaagttatttcatatttcggtctctaggatgccagtgttataacatctcaaagtgctaaaaattttccacgaaaataatctgagccccaagtgtaaagcacaagaaaatcgcatcccatttgtcagacagcaacgacatggctggttgccttcatactgcaatcgcctctgtaatcttcctgtgagacgtagcatcctccagggagtgagttggaaccttagccttgtgtttgcaggccttctttc

SEQ ID NO: 310 - DNA, 484 bp, Homo sapiens
  ref <308>: DATABASE ACCESSION NUMBER: AA972712
  ref <309>: DATABASE ENTRY DATE: 2001-06-18
tttaagaataaagtgaagaaacaattatgatcatggggagaaagaatgtgagagcagaaaggctcaagtttatacatgcatcgaaataagagggaagaaaacaaaaggacaatgcaccatggaaagaaggaaagcaaaataatggaaagggagaaaaaaggagcatctcttcctaggaaagtaatctacaatgctgtgttaatctgccaacgctttggtgggactggcaatcagaaattgtctttcctcactgacaaacatgaccagactctggcccctgatttgtaatttttttcccaaatgtaaaatgagacaaaataactaaaactactttaacttgtttattttgataaaataattatatataattattgttgaaggaaatctacaatacacaatcttgggtgtttttatttaaatctatcacacattgaataacaaaattaaaatgtcagtctttcaactggagaaagtactcaaatca

SEQ ID NO: 311 - DNA, 2156 bp, Homo sapiens
  ref <308>: DATABASE ACCESSION NUMBER: M64673
  ref <309>: DATABASE ENTRY DATE: 2001-06-18
cgggcccgttgcaagatggcggcggccatgctgggccccggggctgtgtgtgcgcagcgggcggcggcgcggcccggaaggctggcgcggcgacggcgttagcccggccctcggcccctctttgcggccgctccctccgcctattccctccttgctcgagatggatctgcccgtgggccccggcgcggcggggcccagcaacgtcccggccttcctgaccaagctgtggaccctcgtgagcgacccggacaccgacgcgctcatctgctggagcccgagcgggaacagcttccacgtgttcgaccagggccagtttgccaaggaggtgctgcccaagtacttcaagcacaacaacatggccagcttcgtgcggcagctcaacatgtatggcttccggaaagtggtccacatcgagcagggcggcctggtcaagccagagagagacgacacggagttccagcacccatgcttcctgcgtggccaggagcagctccttgagaacatcaagaggaaagtgaccagtgtgtccaccctgaagagtgaagacataaagatccgccaggacagcgtcaccaagctgctgacggacgtgcagctgatgaaggggaagcaggagtgcatggactccaagctcctggccatgaagcatgagaatgaggctctgtggcgggaggtggccagccttcggcagaagcatgcccagcaacagaaagtcgtcaacaagctcattcagttcctgatctcactggtgcagtcaaaccggatcctgggggtgaagagaaagatccccctgatgctgaacgacagtggctcagcacattccatgcccaagtatagccggcagttctccctggagcacgtccacggctcgggcccctactcggccccctccccagcctacagcagctccagcctctacgcccctgatgctgtggccagctctggacccatcatctccgacatcaccgagctggctcctgccagccccatggcctcccccggcgggagcatagacgagaggcccctatccagcagccccctggtgcgtgtcaaggaggagccccccagcccgcctcagagcccccgggtagaggaggcgagtcccgggcgcccatcttccgtggacaccctcttgtccccgaccgccctcattgactccatcctgcgggagagtgaacctgcccccgcctccgtcacagccctcacggacgccaggggccacacggacaccgagggccggcctccctcccccccgcccacctccacccctgaaaagtgcctcagcgtagcctgcctggacaagaatgagctcagtgaccacttggatgctatggactccaacctggataacctgcagaccatgctgagcagccacggcttcagcgtggacaccagtgccctgctggacctgttcagcccctcggtgaccgtgcccgacatgagcctgcctgaccttgacagcagcctggccagtatccaagagctcctgtctccccaggagccccccaggcctcccgaggcagagaacagcagcccggattcagggaagcagctggtgcactacacagcgcagccgctgttcctgctggaccccggctccgtggacaccgggagcaacgacctgccggtgctgtttgagctgggagagggctcctacttctccgaaggggacggcttcgccgaggaccccaccatctccctgctgacaggctcggagcctcccaaagccaaggaccccactgtctcctagaggccccggaggagctgggccagccgcccacccccacccccagtgcagggctggtcttggggaggcagggcagcctcgcggtcttgggcactggtgggtcggccgccatagccccagtaggacaaacgggctcgggtctgggcagcacctctggtcaggagggtcaccctggcctgccagtctgccttcccccaaccccgtgtcctgtggtttggttggggcttcacagccacacctggactgaccctgcaggttgttcatagtcagaattgtattttggatttttacacaactgtcccgttccccgctccacagagatacacagatatatacacacagtggatggacggacaagacaggcagagatctataaacagacaggctctaaaaaaaaaaaaaaaaaaaa

SEQ ID NO: 312 - DNA, 3454 bp, Homo sapiens
  ref <308>: DATABASE ACCESSION NUMBER: X90846
  ref <309>: DATABASE ENTRY DATE: 2001-06-18
cgcgcggccaggccctcttagccctctgccgtttggggggcacgggtgaacctgccgccccactcccaccccgccccgccccgcccgtacagacaaatcggaagggacgagcctgccctttgaaagggttttttttcttgctcctgcggagggcgccccagccatggccctcaggagctccctagaccccgcagggactgccctccatcccggccgccggggcccgccctctgcatcccgcgggcagcctgtgtgaagcggcctcccgcagcccccggcccctcccccatggaggaggaggagggggcggtggccaaggagtggggcacgacccccgcggggcccgtctggaccgcggtgttcgactacgaggcggcgggcgacgaggagctgaccctgcggaggggcgatcgcgtccaggtgctttcccaagactgtgcggtgtccggcgacgagggctggtggaccgggcagctccccagcggccgcgtgggcgtcttccccagcaactacgtggcccccggcgcccccgctgcacccgcgggcctccagctgccccaggagatccccttccacgagctgcagctagaggagatcatcggtgtggggggctttggcaaggtctatcgggccctgtggcgtggcgaggaggtggcagtcaaggccgcccggctggaccctgagaaggacccggcagtgacagcggagcaggtgtgccaggaagcccggctctttggagccctgcagcaccccaacataattgcccttaggggcgcctgcctcaaccccccacacctctgcctagtgatggagtatgcccggggtggtgcactgagcagggtgctggcaggtcgccgggtgccacctcacgtgctggtcaactgggctgtgcaggtggcccggggcatgaactacctacacaatgatgcccctgtgcccatcatccaccgggacctcaagtccatcaacatcctgatcctggaggccatcgagaaccacaacctcgcagacacggtgctcaagatcacggacttcggcctcgcccgcgagtggcacaagaccaccaagatgagcgctgcggggacctacgcctggatggcgccggaggttatccgtctctccctcttctccaaaagcagtgatgtctggagcttcggggtgctgctgtgggagctgctgacgggggaggtcccctaccgtgagatcgacgccttggccgtggcgtatggcgtggctatgaataagctgacgctgcccattccctccacgtgccccgagccctttgcccgcctcctggaggaatgctgggacccagacccccacgggcggccagatttcggtagcatcttgaagcggcttgaagtcatcgaacagtcagccctgttccagatgccactggagtccttccactcgctgcaggaagactggaagctggagattcagcacatgtttgatgaccttcggaccaaggagaaggagcttcggagccgtgaggaggagctgctgcgggcggcacaggagcagcgcttccaggaggagcagctgcggcggcgggagcaggagctggcagaacgtgagatggacatcgtggaacgggagctgcacctgctcatgtgccagctgagccaggagaagccccgggtccgcaagcgcaagggcaacttcaagcgcagccgcctgctcaagctgcgggaaggcggcagccacatcagcctgccctctggctttgagcataagatcacagtccaggcctctccaactctggataagcggaaaggatccgatggggccagcccccctgcaagccccagcatcatcccccggctgagggccattcgcctgactcccgtggactgtggtggcagcagcagtggcagcagcagtggaggaagtgggacatggagccgcggtgggcccccaaagaaggaagaactggtcgggggcaagaagaagggacgaacgtgggggcccagctccaccctgcagaaggagcgggtgggaggagaggagaggctgaaggggctgggggaaggaagcaaacagtggtcatcaagtgcccccaacctgggcaagtcccccaaacacacacccatcgcccctggcttcgccagcctcaatgagatggaggagttcgcggaggcagaggatggaggcagcagcgtgcccccttccccctactcgaccccgtcctacctctcagtgccactgcctgccgagccctccccgggggcgcgggcgccgtgggagccgacgccgtccgcgccccccgctcggtggggacacggcgcccggcggcgctgcgacctggcgctgctaggctgcgccacgctgctgggggctgtgggcctgggcgccgacgtggccgaggcgcgcgcggccgacggtgaggagcagcggcgctggctcgacggcctcttctttccccgcgccggccgcttcccgcggggcctcagcccacccgcgcgtccccacggccgccgcgaagacgtgggccccggcctgggcctggcgccctcggccaccctcgtgtcgctgtcgtccgtgtccgactgcaactccacgcgttcactgctgcgctctgacagtgacgaggccgcaccggccgcgccctccccaccaccctccccgcccgcgcccacacccacgccctcgcccagcaccaaccccctggtggacctggagctggagagcttcaagaaggaccccggccagtcgctcacgcccacccacgtcacggctgtatgcgctgtgagccgcgggcaccggcggacgccatcggatggggcgctggggcagcgggggccgcccgagcccgcgggccatggccctggccctcgtgaccttctggacttcccccgcctgcccgacccccaggctctgttcccagcccgccgccggccccctgagttcccaggccgccccaccaccctgacctttgccccgagacctcggccggctgccagtcgcccccgcttggacccctggaaactggtctccttcggccggacactcaccatctcgcctcccagcaggccagacactccggagagccctgggccccccagcgtgcagcccacactgctggacatggacatggaggggcagaaccaagacagcacagtgcccctgtgcggggcccacggctcccactaaggcctgcccaccaccgcccgcctgggcagccatgaatgtagcgccccaggccctgccccagcccgccatgccacaaggtgggggaggccctgggcaggatgttcactctatttattggggaaggagggaggggggggacacttaacttattcctttgtaccccagggggtggagccctgtgcccaccctgcactggggggagggtgggcagggatactcagggacagggcatcatgggggatttggcacaaaatggaacaataaaggtaaccccttgcccccccccccaaaaaaaaaaaaa

SEQ ID NO: 313 - DNA, 2116 bp, Homo sapiens
  ref <308>: DATABASE ACCESSION NUMBER: L33930
  ref <309>: DATABASE ENTRY DATE: 2001-06-18
cggttctccaagcacccagcatcctgctagacgcgccgcgcaccgacggaggggacatgggcagagcaatggtggccaggctggggctggggctgctgctgctggcactgctcctacccacgcagatttattccagtgaaacaacaactggaacttcaagtaactcctcccagagtacttccaactctgggttggccccaaatccaactaatgccaccaccaaggcggctggtggtgccctgcagtcaacagccagtctcttcgtggtctcactctctcttctgcatctctactcttaagagactcaggccaagaaacgtcttctaaatttccccatcttctaaacccaatccaaatggcgtctggaagtccaatgtggcaaggaaaaacaggtcttcatcgaatctactaattccacaccttttattgacacagaaaatgttgagaatcccaaatttgattgatttgaagaacatgtgagaggtttgactagatgatgaatgccaatattaaatctgctggagtttcatgtacaagatgaaggagaggcaacatccaaaatagttaagacatgatttccttgaatgtggcttgagaaatatggacacttaatactaccttgaaaataagaatagaaataaaggatgggattgtggaatggagattcagttttcattggttcattaattctataaggccataaaacaggtaatataaaaagcttccatcgatctatttatatgtacatgagaaggaatccccaggtgttactgtaattcctcaacgtattgtttcgacggcactaatttaatgccgatatactctagatgaatgtttacattgttgagctattgctgttctcttgggaactgaactcactttcctcctgaggctttggatttgacattgcatttgaccttttaggtagtaattgacatgtgccagggcaatgatgaatgagaatctaccccagatccaagcatcctgagcaactcttgattatccatattgagtcaaatggtaggcatttcctatcacctgtttccattcaacaagagcactacattcttttagctaaacggattccaaagagtagaattgcattgaccacgactaatttcaaaatgctttttattattattattttttagacagtctcactttgtcgcccaggccggagtgcagtggtgcgatctcagatcagtgtaccatttgcctcccgggctcaagcgattctcctgcctcagcctcccaagtagctgggattacaggcacctgccaccatgcccggctaatttttgtaattttagtagagacagggtttcaccatgttgcccaggctggtttagaactcctgacctcaggtgatccacccgcctcggcctcccaaagtgctgggattacaggcttgagcccccgcgcccagccatcaaaatgctttttatttctgcatatgtttgaatactttttacaatttaaaaaaatgatctgttttgaaggcaaaattgcaaatcttgaaattaagaaggcaaaatgtaaaggagtcaaactataaatcaagtatttgggaagtgaagactggaagctaatttgcataaattcacaaacttttatactctttctgtatatacattttttttctttaaaaaacaactatggatcagaatagcaacatttagaacactttttgttatcagtcaatatttttagatagttagaacctggtcctaagcctaaaagtgggcttgattctgcagtaaatcttttacaactgcctcgacacacataaacctttttaaaaatagacactccccgaagtcttttgtttgtatggtcacacactgatgcttagatgttccagtaatctaatatggccacagtagtcttgatgaccaaagtcctttttttccatctttagaaaactacatgggaacaaacagatcgaacagttttgaagctactgtgtgtgtgaatgaacactcttgctttattccagaatgctgtacatctattttggattgtatattgtggttgtgtatttacgctttgattcatagtaacttcttatggaattgatttgcattgaacgacaaactgtaaataaaaagaaacggtg

SEQ ID NO: 314 - DNA, 461 bp, Homo sapiens
  ref <308>: DATABASE ACCESSION NUMBER: AI052820
  ref <309>: DATABASE ENTRY DATE: 2001-06-18
tggggtggggccaggtttattattgggtccatggtgggtgaatgggagttggggcacagccatctcagcccaacccggagctgaggccagcaggctggctctggcttctgacctgctgggcaggccggagctccaggggaggctagaggctctgctctgagcaggtgcgcttgttacggtgcaggacgtagcctgcgcggcaggagcagtagaaaccgcccaggtggttgtggcagtggtggtcgcaggtgggcgcctctcccggggccacctggcacttcaatgtcctcggctgcatagaaggcctcgaaccccgtgaacggcttctcgttggagtagtcggagcggaaggtaatgtccaggctggagcccagcgagtagaaagtgtccttgccaggggcccgctccgagtctgtgctctcctgcccgtacagcgtggccagcaccttggcccccgagct

SEQ ID NO: 315 - DNA, 446 bp, Homo sapiens
  ref <308>: DATABASE ACCESSION NUMBER: AI439194
  ref <309>: DATABASE ENTRY DATE: 2001-06-18
tttttttttttttttttttttttttgaattcaaatagtctttaatgtcaaagggaattcagtcataaacctctaaattcccatcattactattcttttcaagggcacagctatgtttgcaatggccctgaaactcctcactcccatacatacaagtcccccatacacacaaagtctcaagcaaatgaggctggagctggagtttgatcttcatttatctgacccaaacacccaggctctttccattgttccacactgcaacatttcagagtagccaaaaaaatggacaacattatcataatacttaaaaaataattattgatgagaaaaaatatttaggactcactggtctatactactgaaatagcccttcaaagtttcttagtaaacttgggaagccgataaacacattcagccaagcatatgatgcagaagctgagtgataaa

SEQ ID NO: 316 - DNA, 1827 bp, Homo sapiens
  ref <308>: DATABASE ACCESSION NUMBER: U31525
  ref <309>: DATABASE ENTRY DATE: 2001-06-18
cctccacaacccacactgcccccacatccccgccgtgcctcctcgctggccgcgctccctcccggtgccggcttctctgagtcaccaacctgaggctgccccggccgcctgcgcacccggcagcaccatgacagatcaggcctttgtgacactaaccacaaacgatgcctacgccaaaggtgccctggtcctgggatcatctctgaaacagcacaggaccaccaggaggctggtcgtgctcgccacccctcaggtctcagactccatgagaaaagttttagagacagtctttgatgaagtcatcatggtagatgtcttggacagtggcgattctgctcatctaaccttaatgaagaggccagagttgggtgtcacgctgacaaagctccactgctggtcgcttacacagtattcaaaatgtgtattcatggatgcagatactctggtcctagcaaatattgatgatctttttgacagagaagaattgtcagcagcaccagacccagggtggcctgactgcttcaattccggagtcttcgtttatcagccttcagttgaaacatacaatcagctgttgcatcttgcttctgagcaaggtagttttgatggtggggaccaaggcatactgaacacattttttagcagctgggcaacaacagatatcagaaaacacctgccatttatttataacctaagcagcatctctatatactcctacctcccggcatttaaagtgtttggtgcaagtgccaaagttgtgcatttcctgggacgagtcaaaccatggaattatacttatgatcccaaaacaaaaagtgtcaaaagtgaggcccatgatcccaacatgactcatccagagtttctcatcctgtggtggaacatctttaccaccaacgttttacctctgcttcaacaatttggccttgtcaaagacacctgctcatatgtaaatgtggaagatgtctcaggagccatatcacatctgtcccttggggagatcccagctatggcacagccgtttgtatcctcggaagaacggaaggaacgatgggaacagggccaggctgattatatgggagcagattcctttgacaacatcaagaggaaacttgacacttacctccagtagaaacactgcatttttctgtgaacacatccacttcacaagccttgtttctgatacttagtatctagagctgggttgagaaaagtctgttacagttgctagaggttttcattaaaacttatcagatgagaggcttttttaggataagaggtgagaactgggcaaaagttgtgaagcagcaattctgttatatggacagtgttctgctttttaatcctatttagcttgtttcagaaattctcacttttgttgactgccaacatacaaagtaagggaaactcaagatattaagatggctgtatcagttcttaaaatctgcagagcctggttcaaaatcagtcactcccttcagaagcagacatggcatctgttccttgcttgcttgttggttgtgtacctttcacgagacctgaattttagaattgcccagtgctgccagagtgagtgagtgtaattctcctttcaggtaaagataggctatctcaacactgctgagtgattcataaacatatcaaccagtagcattaacccattttatttcctgtccttagtgtctgaagatgctcaccagttttctgtgtacagtaaggcagcatgctaaaatgcttttgttcagttctgtatatttgaaaatagcagtgtgttctctgatggttacctgcagtggcaccctgtacaaaaaataaaagacttattgctgt

SEQ ID NO: 317 - DNA, 2604 bp, Homo sapiens
  ref <308>: DATABASE ACCESSION NUMBER: AF045459
  ref <309>: DATABASE ENTRY DATE: 2001-06-18
atgaacatacatcacaatgtgaacagtggtcatctccagatagtagaatttcagatatgtttctttccatttttctgacagtttgaattttctgtaataattaattgacttttatacaatggaaacaacttttttgttttggaaaaagaaagatgctgccgctaatcagtggatgaaagatgataatatggatacaaaatctattctagaagaacttcttctcaaaagatcacagcaaaagaagaaaatgtcaccaaataattacaaagaacggctttttgttttgaccaaaacaaacctttcctactatgaatatgacaaaatgaaaaggggcagcagaaaaggatccattgaaattaagaaaatcagatgtgtggagaaagtaaatctcgaggagcagacgcctgtagagagacagtacccatttcagattgtctataaagatgggcttctctatgtctatgcatcaaatgaagagagccgaagtcagtggttgaaagcattacaaaaagagataaggggtaacccccacctgctggtcaagtaccatagtgggttcttcgtggacgggaagttcctgtgttgccagcagagctgtaaagcagccccaggatgtaccctctgggaagcatatgctaatctgcatactgcagtcaatgaagagaaacacagagttcccaccttcccagacagagtgctgaagatacctcgggcagttcctgttctcaaaatggatgcaccatcttcaagtaccactctagcccaatatgacaacgaatcaaagaaaaactatggctcccagccaccatcttcaagtaccagtctagcgcaatatgacagcaactcaaagaaaatctatggctcccagccaaacttcaacatgcagtatattccaagggaagacttccctgactggtggcaagtaagaaaactgaaaagtagcagcagcagtgaagatgttgcaagcagtaaccaaaaagaaagaaatgtgaatcacaccacctcaaagatttcatgggaattccctgagtcaagttcatctgaagaagaggaaaacctggatgattatgactggtttgctggtaacatctccagatcacaatctgaacagttactcagacaaaagggaaaagaaggagcatttatggttagaaattcgagccaagtgggaatgtacacagtgtccttatttagtaaggctgtgaatgataaaaaaggaactgtcaaacattaccacgtgcatacaaatgctgagaacaaattatacctggcagaaaactactgttttgattccattccaaagcttattcattatcatcaacacaattcagcaggcatgatcacacgccgccaccctgtgtcaacaaaggccaacaaggtccccgactctgtgtccctggcaaatggaatctgggaactgaaaagagaagagattaccttgttgaaggagctgggaagtggccagtttggagtggtccagctgggcaagtggaaggggcagtatgatgttgctgttaagatgatcaaggagggctccatgtcagaagatgaattctttcaggaggcccagactatgatgaaactcagccatcccaagctggttaaattctatggagtgtgttcaaaggaataccccatatacatagtgactgaatatataagcaatggctgcttgctgaattacctgaggagtcacggaaaaggacttgaaccttcccagctcttagaaatgtgctacgatgtctgtgaaggcatggccttcttggagagtcaccaattcatacaccgggacttggctgctcgtaactgcttggtggacagagatctctgtgtgaaagtatctgactttggaatgacaaggtatgttcttgatgaccagtatgtcagttcagtcggaacaaagtttccagtcaagtggtcagctccagaggtgtttcattacttcaaatacagcagcaagtcagacgtatgggcatttgggatcctgatgtgggaggtgttcagcctggggaagcagccctatgacttgtatgacaactcccaggtggttctgaaggtctcccagggccacaggctttaccggccccacctggcatcggacaccatctaccagatcatgtacagctgctggcacgagcttccagaaaagcgtcccacatttcagcaactcctgtcttccattgaaccacttcgggaaaaagacaagcattgaagaagaaattaggagtgctgataagaatgaatatagatgctggccagcattttcattcattttaaggaaagtagcaaggcataatgtaatttagctagtttttaatagtgttctctgtattgtctattatttagaaatgaacaaggcaggaaacaaaagattcccttgaaatttagatcaaattagtaattttgttttatgctgctcctgatataacactttccagcctatagcagaagcacattttcagactgcaatatagagactgtgttcatgtgtaaagactgagcagaactgaaaaattacttattggatattcattcttttctttatattgtcattgtcacaacaattaaatatactaccaagtacagaaatgtggaaaaaaaaaa

SEQ ID NO: 318 - DNA, 520 bp, Homo sapiens
  Modified_base 1 ... 520: n = a,c,g, or t
  ref <308>: DATABASE ACCESSION NUMBER: AA176867
  ref <309>: DATABASE ENTRY DATE: 2001-06-18
ttttattttggtagttgtttttatggatgtgaaaaatattaccactgcaactagcaagaactataaatgatacattattgcaagtgttctaaaaaatcagaacaaaactaatttattatagttctgtcttcattatacaccacgtgttggtgagttaaacacaacaaaattgtcttttcttttaaaagtgtctactaaagataaaaagaataagataacaattaacatgtagtttgttacattaaaaaatctgatatacatatttctattgcctgttagcttgttctaagcctctttaactattacaacaaaaaanaaaaaaggaaagaaaaagaaaattcattgtttaaaggcaaacattcaattcagttggntaccaccttacagtacagtccaactaacatccttccacganggtaaccagtccagcccttagcttcctggggttaaaagtctataggccngattggccaccaaaggtttccatgccggcttccaaaccgnatggttagccttttgg

SEQ ID NO: 319 - DNA, 1618 bp, Homo sapiens
  ref <308>: DATABASE ACCESSION NUMBER: M95767
  ref <309>: DATABASE ENTRY DATE: 2001-06-18
atgtcccggccgcagcttcgacgctggcgcctcgtctctagcccgccgagcggcgtcccgggtctagcgctgctggcgctgctggcgctgctggcgctgcggctcgcggccgggaccgactgcccatgcccggagcctgagctctgccgcccgattcgccaccatccagatttcgaggtctttgtgtttgatgttggacagaaaacttggaaatcttatgattggtcacagattacaactgtggcaacatttggaaaatatgactcagaacttatgtgctacgctcattcaaaaggagccagagtagtacttaaaggagatgtatccttaaaggatatcattgatcctgctttcagagcatcctggatagctcaaaaacttaatttggccaaaacacaatatatggatggaattaatatagatatagagcaagaagttaattgtttatcacctgaatatgatgcattaactgctttagtcaaagaaactacagactctttccatcgtgaaattgagggatcacaggtaacctttgatgtagcttggtctccaaagaacatagacagaagatgctataattatactggaatcgcagatgcttgtgacttcctctttgtgatgtcttatgatgaacaaagtcagatctggtcagaatgtattgcagcagccaatgctccctataatcagacattaactggatataatgactacatcaagatgagcattaatcctaagaaacttgtaatgggtgttccttggtatggttatgattatacctgcctgaatctgtctgaggatcatgtttgtaccattgcaaaagtccctttccggggggctccttgtagtgacgctgcaggacgtcaggtgccctacaaaacgatcatgaagcaaataaatagttctatttctggaaacctatgggataaagatcagcgggctccttattataactataaagatcctgctggccactttcatcaagtatggtatgataaccctcagagtatttctttaaaggcaacatatatacaaaactatcgcttacggggcattggcatgtggaatgcaaactgtcttgactactctggagatgctgtagccaaacagcaaactgaagaaatgtgggaagtcttaaagccaaagctgttacagagatgaacatcttttgtcaaaccattaagagttagaaagatgatctgtatcaacagatctagtttcttgcatttttattatgttgctatatacttttgttatccgtatactaaaaaaaaagaataaataaatgttttgattgtttgaatttgaaaaatacacacgaatgtcctcagtatccaggaacataaaggcaagaagcaagtcaacttacctattaaatattcctctattagatgtttcaacactataatttaattgggaaaaattgctttcagaattttattatgccatatttcccttcattatagtaaaatatatgctcacgaatcaatgctgatttttaaaatatgtataatctgaagtggaaattgtttgcttagagtttttaaaaacctagtctttgaaaagcagtttgtgctatacttttcccccaaccctccaataaatcttaaatttaaaacct

SEQ ID NO: 320 - DNA, 905 bp, Homo sapiens
  ref <308>: DATABASE ACCESSION NUMBER: X58794
  ref <309>: DATABASE ENTRY DATE: 2001-06-18
cggctgacagtcctggccctgctggctggtctgctggcgtcctcgagggccggctccagcccccttttggacatcgttggcggccggaaggcgaggccccgccagttcccgttcctggcctccattcagaatcaaggcaggcacttctgcgggggtgccctcatccatgcccgcttcgtgatgaccgcggccagctgcttccaaagccagaaccctggggttagcaccgtggtgctgggtgcctatgacctgaggcggcgggagaggcagtcccgccagacgttttccatcagcagcatgagcgagaatggctacgacccccagcagaacctgaacgacctgatgctgcttcagctggaccgtgaggccaacctcaccagcagcgtgacgatactgccactgcctctgcagaacgccacggtggaagccggcaccagatgccaggtggccggctgggggagccagcgcagtggggggcgtctctcccgttttcccaggttcgtcaacgtgactgtgacccccgaggaccagtgtcgccccaacaacgtgtgcaccggtgtgctcacccgccgcggtggcatctgcaatggggacgggggcacccccctcgtctgcgagggcctggcccacggcgtggcctccttttccctggggccctgtggccgaggccctgacttcttcacccgagtggcgctcttccgagactggatcgatggtgttctcaacaacccgggaccggggccagcctaggggggcctgtgacctcccatggagcccagcccccgccctccacacctccggcgctccgcacccacctcccacggccccgcccctgcccccgctccggccagaggggcctggctgtaataaagaagccgatctctcctctgaaaaaaaaaaaaaaa

SEQ ID NO: 321 - DNA, 413 bp, Homo sapiens
  Modified_base 1 ... 413: n = a,c,g, or t
  ref <308>: DATABASE ACCESSION NUMBER: AI352299
  ref <309>: DATABASE ENTRY DATE: 2001-06-18
tgaaatgttgtgaatttaattttgatattgagagttggaaaaaagttttgtgattgattcctttttcttttgtagcctaccgtatgtgaacgggagctgtgtgtgtttgcttttcaaaccctgggagtaatgaatgaagctgctgatgaaatagcaactggagctcaggtagtaacacaggatactaattatttcttattttgctttgaaaaatttgttccagtccactagttatcttcattctgctattctttggggaaaatatttgataacttctatntaagtggcaaattggcatttgattttttttatatgtaactaaatgggtgatctctcattaatggtgtgtnttcgtantntntgtgattgcaagggagagaaattaaccaactttcattgcatgaaaatattct

SEQ ID NO: 322 - DNA, 1589 bp, Homo sapiens
  ref <308>: DATABASE ACCESSION NUMBER: X54150
  ref <309>: DATABASE ENTRY DATE: 2001-06-18
ggcacagatcttggaacgagacgacctgctgtcagcacgatggaccccaaacagaccaccctcctgtgtcttgtgctctgtctgggccagaggattcaggcacaggaaggggactttcccatgcctttcatatctgccaaatcgagtcctgtgattcccttggatggatctgtgaaaatccagtgccaggccattcgtgaagcttacctgacccagctgatgatcataaaaaactccacgtaccgagagataggcagaagactgaagttttggaatgagactgatcctgagttcgtcattgaccacatggacgcaaacaaggcagggcgctatcagtgccaatataggatagggcactacagattccggtacagtgacaccctggagctggtagtgacaggcttgtatggcaaacccttcctctctgcagatcggggtctggtgttgatgccaggagagaatatttccctcacgtgcagctcagcacacatcccatttgatagattttcactggccaaggagggagaactttctctgccacagcaccaaagtggggaacacccggccaacttctctttgggtcctgtggacctcaatgtctcagggatctacaggtgctacggttggtacaacaggagcccctacctgtggtccttccccagtaatgccttggagcttgtggtcacagactccatccaccaagattacacgacgcagaacttgatccgcatggccgtggcaggactggtcctcgtggctctcttggccatactggttgaaaattggcacagccatacggcactgaacaaggaagcctcggcagatgtggctgaaccgagctggagccaacagatgtgtcagccaggattgacctttgcacgaacaccaagtgtctgcaagtaaacacctggaggtgaaggcagagaggagccaggactgtggagtccgacaaagctacttgaaggacacaagagagaaaagctcactaagaagcttgaatctacttttttttttttttgagacagagtctggctctgtcacccaggctgaagtgcagtggagcaatctcggctcattgaacctcttgggttcaagtgattcttgtgcctcagcctcccaagtagctggaattacaggcacataccactgcacccagctaatttttgtatttttagtagagatggggtttcactgtgttggccaggctggtctcgaactcctggacctcaggtgatccacccaccttggcctcccaaagtgctgagattataggcatgagccaccacgcctggccagatgcatgttcaaaccaatcaaatggtgttttcttatgcaggactgatcgatttgcacccacctttctgcacataagttatggttttccatcttatctgtcttctgattttttatatcctgtttaatttcttccttcattgttcttctctttttttatttattttatttatttttatttttatttttatttgagacagagtctcactctgttgcccaggaggcggaggttgcagtgaaccaagagatggcgccagtgcactccaccctgggtgacagagagactctttcttttt

SEQ ID NO: 323 - DNA, 4737 bp, Homo sapiens
  ref <308>: DATABASE ACCESSION NUMBER: AB014536
  ref <309>: DATABASE ENTRY DATE: 2001-06-18
gtcccagcgtcgctccggacgctgccaacctgttctccaccgtcgctcgacttccacctctaagactcccacgaaactcaggttgaataattcatcaaattacacaactgaactcaagacatggctgcccagtgtgtcacaaaggtggcgctgaatgtttcctgtgccaatcttttggataaagatatagggtcaaagtcagaccctttatgtgtgttgtttttgaatacaagtggtcaacagtggtatgaggttgagcgcacagaaaggattaagaattgcttgaatccccaattttccaagacatttattattgattactactttgaagtggttcagaaattgaaatttggggtttatgacatcgacaacaaaactattgagctgagtgatgatgacttcttaggggaatgtgaatgtacccttggacaaattgtttccagcaagaagctaactcgaccactggtgatgaaaactggcagacctgcaggaaaagggagcattacgatttcagctgaagaaataaaagataatagagtggtcttgtttgaaatggaagccagaaaactggataataaggatctatttggaaagtcagacccatacctggaattccacaagcagacatctgatggaaactggctaatggttcatcggacagaggttgttaaaaacaacttgaatcctgtttggaggcctttcaagatctctcttaactcactgtgttacggagatatggacaaaaccattaaggtggagtgttatgattatgacaatgatgggtcacatgatctcattggaacatttcagaccaccatgacaaaactgaaagaagcctccagaagctcacctgttgaatttgaatgcataaatgagaaaaaaaggcaaaagaaaaaaagctacaagaattcaggtgttatcagtgtgaaacagtgtgagattacagtagaatgcacattccttgactatataatgggaggatgtcagctgaattttactgtgggagtggacttcactggctccaatggtgacccaaggtctccagactcccttcattacatcagccccaatggcgttaatgagtatttgactgctctctggtctgtgggactggtcattcaagattatgatgctgataagatgtttccagcttttggttttggcgctcagatacctcctcagtggcaggtatcacatgaatttccaatgaacttcaacccatccaatccctactgcaatggaatccaaggcattgtagaggcgtatcggtcttgtcttcctcagataaaactctatggaccaactaatttttctccaatcataaatcacgtggccaggtttgctgctgcagccacgcaacagcagacagcttctcaatattttgtgcttttgattattactgatggtgtgatcacagaccttgatgaaaccagacaagctatagttaatgcctccaggctgcctatgtccatcataattgttggagttggaggtgctgacttcagcgccatggagtttctggatggtgatggtggaagtctccgctccccattgggcgaagtggccatcagagatattgtccagtttgtgcctttcagacagttccagaatgctccaaaagaagcacttgctcagtgtgtcttggcagagattccccagcaggtggtgggctacttcaatacatacaaactccttcctcccaagaacccagccacgaaacaacagaagcagtgaccacttcaacagaattcttttgtgttatgtggagcaatgccatctctcaccccaaatcgtgtatctgtcattctacgtactttttacccccagcatttatgatgtaaatctctttctctatggattatatctgtttaaagcattctttctaggttattttggggggacagtgccaagtccatctttgcccagtcaattcagtgattgatagcaatttacattaattgcagtaaagctctttggattagaaattagtgtggggaaagcttattctgttgttgtttttgtttactttcatatgatgaaaatgctgtgtttaagtgtttgtcaataggaagaatggaaaactgttgggatgatgtggtttgcaggttgctgtgcctgattcacagtgtatgttgtataagccaatgtccatacctgattatgagagcttcttaaattatatgatatcaaatttgttcctgtaactctgtatacagtgcttttctgcaaggtaaaaataacctgtctatgcatctgatttttgctacagtttagacactgtggtttacaaaacagcatgcactcaacttgggactttatgaaaagtactgaatgagcaggaaaaggcgcatactcagttttttaaatgtacaatcaacaagtaaaaataacctcatgtaagtaagccatttttatttgcctttctagatattttattttattgtggaaaactgtaaacatggtcagatttggctttttttttcattaactgagcaagactttcaggatattgtagatgcacagatggtaggttgtcctgaattctacattattagattactttaattgagatttgttaaaacggttaggactgttttgtccaggaaagataagaggaccaaacatataaggtgaaattcagaattccgtttccttctaactaatgaaaaactgcttactaaaaaaaaattttatactttccttgctaaggtcccatatattgatttgtacagatccacttagtcattttctcctttttttaagaaccattttcatctgatttttaaactcacgataccagttatctgttaatcaaaattgcattttacaatttaataatgtgatatttcctatgtctacagcataccttattaggtataaaacctactgcaacttagaaaaaggaaagaaaaaagaagacttttccaactgctgcattaagatagggtggattttatgtgctttttttttttaagagttgaatttcttttcctgacttttaccttttacagcgtattacttagtgaacattacattttcagaatagatcctaatattttattgagggcctatgtgctaaaaactatgcatatctatatattggccaattatctttaataatttaccttttgaaattgcatgtttatcatatatccttaagtggacacatacagtgccatgttgatgtgcctctcagttttattgaaaagctgccccacagcccatgtctcttgttctctgcaatgcctcaagggagtgagctctcaaccacagatagctgtggcttctcagaagcagctcattgccaaggccaggctgagaggggacctgcttgctgtggtggttgcctagcccagatgagcatttacctaccaccttcccacttggctagctgtcctttggatatgtgctgttaactggggaaggcatctaactagtagcctgctactccatagtatggctcaatagatgacacatcattttgacattatcaataggagaaaagaaaactaacccttcttctgattgtttggagccatagttgtctcagatgttctaattctctttgtatgcttggaaacagcatagatatgttgctgtggttttcagaattttctcttttaatcacaagaagccttttaaaaaatgacttacacatattctcaatgtacagtaaaacagacagaagtgagcttatctgtttgatgctgtggcagggtcccagtcactgggcatatcctccttctccttaaccagcttctcagcagcccctgagtcacctgcacaaggtgcttgggaactgctggttatgagcattcctggttttcttcagccaaataacaggtaatcactgtcaattggatttggtcttcattattttatattctgattttatcagaattattctattttaaaattgttttaaaatttaaaaacatttaattcatgatcatgttcatcagtagatgctattattcataagaactgtgattccagcaaactagggtaattggtgcctttttacagttttgaataaaagcatttacaatttctaaattatcagttttcacagtttcagcactcaacctcatcatacgctgatttaatattgttttacattaaaatagtccttttccctgttgtgccaccattcatttaagtgctgtttgttcttaaaatgcatttaaagaaaaattacccatattgactttcacacctcatataatcagatctattacaaatatatatcggagtgacggtgcccaggatagatgtaatatttcttacagatgctggcacagaggaaataatataccagctaatctagtcacctaaccttgtggttagaattgcaattttaagaccagaaaaatttgaagtctgatcagagatttacaactgttcattatagtggtgccttaggcaatctttccaaagtaaattcagggccccattgctacttatgccatatttggacatactttttttttcttcaattttgtaaacttcctggaaagctgtcttcactaagtatcccctagtctctatatatgtggttagtagtcatggaaatgacacataaagtacgccagaagtttgatggaacgtgttagaaactgttttgtgcttttatggatgtcatacttgacaatacatgtgtaagttactaatatatgaattgatgctaaatatatcttacatttgaattccttttggataaagttatttcttgatgtg

SEQ ID NO: 324 - DNA, 486 bp, Homo sapiens
  ref <308>: DATABASE ACCESSION NUMBER: AI470098
  ref <309>: DATABASE ENTRY DATE: 2001-06-18
gatgatgctggggttcacggagtagaaatggagccagtatttggaaagcgaggacaaccggcaggttcttggggagtttctggaaagcaccagcccggcttgccttgtgtttagcttcgccgcctcggggcgccttgcggcttcccaggaggtaagaggcgacgggcaaggggacctgcccatccaacaaaactacccaggggagacagcccagtcgctcccctttggattcccgcggggcgctcactcgggcactttaacaaacctggcttgaagtccccatcctgaggcccgcaggactcctccccacgtgcacccactctgcagttcagcagctgcagattccaagagatgcaaaccataaacttgtttttttttccaagaagattactgaaagcattggagtaaatgacttttctcaagtggttttatttggagagttacctgcgttgtctcttggacatgtatctgctttccttgatgaga

SEQ ID NO: 325 - DNA, 2532 bp, Homo sapiens
  ref <308>: DATABASE ACCESSION NUMBER: U07139
  ref <309>: DATABASE ENTRY DATE: 2001-06-18
cggcgccgctcgctcccccgacccggactcccccatgtatgacgactcctacgtgcccgggtttgaggactcggaggcgggttcagccgactcctacaccagccgcccatctctggactcagacgtctccctggaggaggaccgggagagtgcccggcgtgaagtagagagccaggctcagcagcagctcgaaagggccaagcacaaacctgtggcatttgcggtgaggaccaatgtcagctactgtggcgtactggatgaggagtgcccagtccagggctctggagtcaactttgaggccaaagattttctgcacattaaagagaagtacagcaatgactggtggatcgggcggctagtgaaagagggcggggacatcgccttcatccccagcccccagcgcctggagagcatccggctcaaacaggagcagaaggccaggagatctgggaacccttccagcctgagtgacattggcaaccgacgctcccctccgccatctctagccaagcagaagcaaaagcaggcggaacatgttcccccatatgacgtggtgccctccatgcggcctgtggtgctggtgggaccctctctgaaaggttatgaggtcacagacatgatgcagaaggctctcttcgacttcctcaaacacagatttgatggcaggatctccatcacccgagtcacagccgacctctccctggcaaagcgatctgtgctcaacaatccgggcaagaggaccatcattgagcgctcctctgcccgctccagcattgcggaagtgcagagtgagatcgagcgcatatttgagctggccaaatccctgcagctagtagtgttggacgctgacaccatcaaccacccagcacagctggccaagacctcgctggcccccatcatcgtctttgtcaaagtgtcctcaccaaaggtactccagcgtctcattcgctcccgggggaagtcacagatgaagcacctgaccgtacagatgatggcatatgataagctggttcagtgcccaccggagtcatttgatgtgattctggatgagaaccagctggaggatgcctgtgagcacctggctgagtacctggaggtttactggcgggccacgcaccacccagcccctggccccggacttctgggtcctcccagtgccatccccggacttcagaaccagcagctgctgggggagcgtggcgaggagcactccccccttgagcgggacagcttgatgccctctgatgaggccagcgagagctcccgccaagcctggacaggatcttcacagcgtagctcccgccacctggaggaggactatgcagatgcctaccaggacctgtaccagcctcaccgccaacacacctcggggctgcctagtgctaacgggcatgacccccaagaccggcttctagcccaggactcagagcacaaccacagtgaccggaactggcagcgcaaccggccttggcccaaggatagctactgacagcctcctgctgccctaccctggcaggcacaggcgcagctggctggggggcccactccaggcagggtggcgttagactggcatcaggctggcactaggctcagcccccaaaaccccctgcccagccccagcttcagggctgcctgtggtcccaaggttctgggagaaacaggggaccccctcacctcctgggcagtgacccctactaggctcccattccaggtactagctgtgtgttctgcacccctggcaccttcctctcctcccacacaggaagctgccccactgggcagtgccctcaggccaggatccccttagcagggtccttcccaccagactcagggaagggatgccccattaaagtgacaaaagggtggggtgtgggcaccatggcatgaggaagaaacaaggtccctgagcaggcacaagtcctgacagtcaagggactgctttggcatccagggcctccagtcacctcactgccatacattagaaatgagacaatcaaagccccccccagggtggcacacccatccgtttgctggggtgtggcagccacatccaagactggagcagcaggctggccacgctcgggccagagagagctcacagctgaagctcttggagggaagggctctcctcaccctgccaggaagcttcttaacatgtgacaggaccagggaccaggagcatggtgaagccaagtggcagatgggagccaacctggatgggggtttggggaaggagggcatgtgtagcagagaacttaggggggcctccttgcctttctcattcttttgccctgcatcctgtcatttctgttcttgtccctcatacatctttggagaaccgggctccagactttgttccctgactcatagctgccgcttgttaggttagggttagatggggagagacagggcacagaggacctgtctccccggctactcttgccttatggctctagtgtgtgacctacagagcatgctccacaagcccctgcctcacctcactgtcatcactaataaacatcatgcacagtc

SEQ ID NO: 326 - DNA, 819 bp, Homo sapiens
  ref <308>: DATABASE ACCESSION NUMBER: U08471
  ref <309>: DATABASE ENTRY DATE: 2001-06-18
cgcaggaatagatggacatggcctggcagatgatgcagctgctgcttctggctttggtgactgctgcggggagtgcccagcccaggagtgcgcgggccaggacggacctgctcaatgtctgcatgaacgccaagcaccacaagacacagcccagccccgaggacgagctgtatggccagtgcagtccctggaagaagaatgcctgctgcacggccagcaccagccaggagctgcacaaggacacctcccgcctgtacaactttaactgggatcactgtggtaagatggaacccacctgcaagcgccactttatccaggacagctgtctctatgagtgctcacccaacctggggccctggatccggcaggtcaaccagagctggcgcaaagagcgcattctgaacgtgcccctgtgcaaagaggactgtgagcgctggtgggaggactgtcgcacctcctacacctgcaaaagcaactggcacaaaggctggaattggacctcagggattaatgagtgtccggccggggccctctgcagcacctttgagtcctacttccccactccagccgccctttgtgaaggcctctggagccactccttcaaggtcagcaactatagtcgagggagcggccgctgcatccagatgtggtttgactcagcccagggcaaccccaatgaggaggtggccaagttctatgctgcggccatgaatgctggggccccgtctcgtgggattattgattcctgatccaagaagggtcctctggggttcttccaacaacctattctaatagacaaatccacatgaaaaaaaaaaa

SEQ ID NO: 327 - DNA, 2681 bp, Homo sapiens
  ref <308>: DATABASE ACCESSION NUMBER: AF077346
  ref <309>: DATABASE ENTRY DATE: 2001-06-18
ctctctggataggaagaaatatagtagaaccctttgaaaatggatattttcacatattttcgttcagatacaaaagctggcagttactgaaataaggacttgaagttccttcctctttttttatgtcttaagagcaggaaataaagagacagctgaaggtgtagccttgaccaactgaaagggaaatcttcatcctctgaaaaaacatatgtgattctcaaaaaacgcatctggaaaattgataaagaagcgattctgtagattctcccagcgctgttgggctctcaattccttctgtgaaggacaacatatggtgatggggaaatcagaagctttgagaccctctacacctggatatgaatcccccttctaatacttaccagaaatgaaggggatactcagggcagagttctgaatctcaaaacactctactctggcaaaggaatgaagttattggagtgatgacaggaacacgggagaacaatgctctgtttgggctggatatttctttggcttgttgcaggagagcgaattaaaggatttaatatttcaggttgttccacaaaaaaactcctttggacatattctacaaggagtgaagaggaatttgtcttattttgtgatttaccagagccacagaaatcacatttctgccacagaaatcgactctcaccaaaacaagtccctgagcacctgcccttcatgggtagtaacgacctatctgatgtccaatggtaccaacaaccttcgaatggagatccattagaggacattaggaaaagctatcctcacatcattcaggacaaatgtacccttcactttttgaccccaggggtgaataattctgggtcatatatttgtagacccaagatgattaagagcccctatgatgtagcctgttgtgtcaagatgattttagaagttaagccccagacaaatgcatcctgtgagtattccgcatcacataagcaagacctacttcttgggagcactggctctatttcttgccccagtctcagctgccaaagtgatgcacaaagtccagcggtaacctggtacaagaatggaaaactcctctctgtggaaaggagcaaccgaatcgtagtggatgaagtttatgactatcaccagggcacatatgtatgtgattacactcagtcggatactgtgagttcgtggacagtcagagctgttgttcaagtgagaaccattgtgggagacactaaactcaaaccagatattctggatcctgtcgaggacacactggaagtagaacttggaaagcctttaactattagctgcaaagcacgatttggctttgaaagggtctttaaccctgtcataaaatggtacatcaaagattctgacctagagtgggaagtctcagtacctgaggcgaaaagtattaaatccactttaaaggatgaaatcattgagcgtaatatcatcttggaaaaagtcactcagcgtgatcttcgcaggaagtttgtttgctttgtccagaactccattggaaacacaacccagtccgtccaactgaaagaaaagagaggagtggtgctcctgtacatcctgcttggcaccatcgggaccctggtggccgtgctggcggcgagtgccctcctctacaggcactggattgaaatagtgctgctgtaccggacctaccagagcaaggatcagacgcttggggataaaaaggattttgatgctttcgtatcctatgcaaaatggagctcttttccaagtgaggccacttcatctctgagtgaagaacacttggccctgagcctatttcctgatgttttagaaaacaaatatggatatagcctgtgtttgcttgaaagagatgtggctccaggaggagtgtatgcagaagacattgtgagcattattaagagaagcagaagaggaatatttatcttgagccccaactatgtcaatggacccagtatctttgaactacaagcagcagtgaatcttgccttggatgatcaaacactgaaactcattttaattaagttctgttacttccaagagccagagtctctacctcatctcgtgaaaaaagctctcagggttttgcccacagttacttggagaggcttaaaatcagttcctcccaattctaggttctgggccaaaatgcgctaccacatgcctgtgaaaaactctcagggattcacgtggaaccagctcagaattacctctaggatttttcagtggaaaggactcagtagaacagaaaccactgggaggagctcccagcctaaggaatggtgaaatgagccctggagccccctccagtccagtccctgggatagagatgttgctggacagaactcacagctctgtgtgtgtgtgttcaggctgataggaaattcaaagagtctcctgccagcaccaagcaagcttgatggacaatggaatgggattgagactgtggtttagagcctttgatttcctggactggacagacggcgagtgaattctctagaccttgggtactttcagtacacaacacccctaagatttcccagtggtccgagcagaatcagaaaatacagctacttctgccttatggctagggaactgtcatgtctaccatgtattgtacatatgactttatgtatacttgcaatcaaataaatattattttattagaaaaaaaaccggaattc

SEQ ID NO: 328 - DNA, 4312 bp, Homo sapiens
  ref <308>: DATABASE ACCESSION NUMBER: AB020686
  ref <309>: DATABASE ENTRY DATE: 2001-06-18
cgaccgcggcggctggaaccctgattgctgtccttcaacgtgttcattatgaagttattagtaatacttttgttttctggacttataactggttttagaagtgactcttcctctagtttgccacctaagttactactagtatcctttgatggcttcagagctgattatctgaagaactatgaatttcctcatctccagaattttatcaaagaaggtgttttggtagagcatgttaaaaatgtttttatcacaaaaacatttccaaaccactacagtattgtgacaggcttgtatgaagaaagccatggcattgtggctaattccatgtatgatgcagtcacaaagaaacacttttctgactctaatgacaaggatcctttttggtggaatgaggcagtacctatttgggtgaccaatcagcttcaggaaaacagatcaagtgctgctgctatgtggcctggtactgatgtacccattcacgataccatctcttcctattttatgaattacaactcctcagtgtcatttgaggaaagactaaataatattactatgtggctaaacaattcgaacccaccagtcacctttgcaacactatattgggaagaaccagatgcaagtggccacaaatacggacctgaagataaagaaaacatgagcagagtgttgaaaaaaatagatgatcttatcggtgacttagtccaaagactcaagatgttagggctatgggaaaatcttaatgtgatcattacaagtgatcatgggatgacccagtgttctcaggacagactgataaacctggattcctgcatcgatcattcatactacactcttatagatttgagcccagttgctgcaatacttcccaaaataaatagaacagaggtttataacaaactgaaaaactgtagccctcatatgaatgtttatctcaaagaagacattcctaacagattttattaccaacataatgatcgaattcagcccattattttggttgccgatgaaggctggacaattgtgctaaatgaatcatcacaaaaattaggtgaccatggttatgataattctttgcctagtatgcatccatttctagctgcccacggacctgcatttcacaaaggctacaagcatagcacaattaacattgtggatatttatccaatgatgtgccacatcctgggattaaaaccacatcccaataatgggacctttggtcatactaagtgcttgttagttgaccagtggtgcattaatctcccagaagccatcgcgattgttatcggttcactcttggtgttaaccatgctaacatgcctcataataatcatgcagaatagactttctgtacctcgtccattttctcgacttcagctacaagaagatgatgatgatcctttaattgggtgacatgtgctagggcttatacaaagtgtctttgattaatcacaaaactaagaatacatccaaagaatagtgttgtaactatgaaaaagaatactttgaaagacaaagaacttagactaagcatgttaaaattattactttgttttccttgtgttttgtttcggtgcatttgctaataagataacgctgaccatagtaaaattgttagtaaatcattaggtaacatcttgtggtaggaaatcattaggtaacatcaatcctaactagaaatactaaaaatggcttttgagaaaaatacttcctctgcttgtattttgcgatgaagatgtgatacatctttaaatgaaaatataccaaaatttagtaggcatgtttttctaataaatttatatatttgtaaagaaaacaacagaaatctttatgcaatttgtgaattttgtatattagggaggaaaagcttcctatatttttatatttacctttaattagtttgtatctcaagtaccctcttgaggtaggaaatgctctgtgatggtaaataaaattggagcagacagaaaagatatagcaaatgaagaaatattttaaggaaacctatttgaaaaaaaaagcaaagaccatttgataaaagcctgagttgtcaccattatgtcttaagctgttagtcttaaagattattgttaaaaaattcagaagaaaagagagacaagtgctcttctctctatctatgcttaatgcctttatgtaagttacttagttgtttgcgtgtgcctgtgcaagtgtgtttgtgtgtggttgtgtggacattatgtgatttactatataaggaggtcagagatggactgtggccaggcttccacattcctgaagcacacagatctcaggaaaggttatttttgcacttcatatttgtttactttctcctaactcacaagttaaaatcataacttaatttcattaacttttatcatttaactctctcatgtttgttgtaacctgaggtatccaaatgctacagaaaaatttatgacccaaatacaaatctcaatttgactgggacagaatgaggaatggagatttttgtatttatctttgggactttatgccttactttttaggctatagaatagttaagaaattttaaacaaaatttagtatcttttggtctttcacaccattcatatgttaagtggcagaatagccttagtgctacctccactttttttctccagtatttgcatcacagaaataatccctctgtttaacatgtttgttcagagccaagggtttattgtgaagaactgtcatcctgcctttgctagctggtaccttctagtaatcaaaattaatatgaagaaactaggttgtgacagactagattatatttagtaggggaaaaattgggctcaagaaccattcatcagtacgtgagacaagcagttaatagtatgatctttaaagttttgacaatataaaataaacttggtaactgttttacaaatataaaagtataataaatatgcagcccagttaaatattgattatctgtgatggtaaagaacaacagtggtgccagtcatcaaacatacagtgcgtcctattgagtcactgctaatttcttgagcctggtatttgctgcctattgtatttgtggttgttgagaggcattttcaaaccctgtataaataatccatgctgttggtcataagttaactgtattaagaacagtaaaataaataaaaaccaatagtactaattttgctttaaaaaaatttctaatttttttcacataaaacaattatcctaaaggttaatagttgatcgaaacagaataatagaaaaattctactttaatttccattaaaaagcaaatagcattgacacatttaaagcttttcatttaaagtagtggatgtttttgaagtatctaaaatagtagcagaatattttatacttggtccttgcaatggtgtgagttttaatgattgcattatcgtgattggtggttatgagtttcagaaatctatacttggcatccaactcatgagtggattttatataggatggaacaggaaggtatgtcctgtcagtatcttaaccctttcaacaagacatttacctatttgtctttccttacgttctcaaaatattaactcgaattgtaaattaagcaaaaatttaaaaagtatatgttgatgggacaagaagaatagtatttatttaataaaacatatattatattgaactatgtgttaattcatttgtatcttttaaaaaattatcactgttaaagccattgactcctttagtacactgagaaaaatcttatagtaaaactagcctttcacattaaggttttggtgtgtattttgttaaataactaacatgctgctctattttctgggtgtagaaagtatttggctctaggaaacatttacttgtttgtgaaaacaataccccaaggtaataggaaaagtttgagttaagtgtttttaattcagtcagtgaattcagaataagtacattcatgtataacatagggacagttctgctgctgttatttatatgcaattcttctggtaaatagcaatagaataaaacatatttcaatgtttgtgtataggttttatattattattccactaggaatggcataagaatttatagataaattcttgtaacattaaaggattaaaatgtttttacattgtttttgggtgtctccttcttgtgcccatatctgataagctttatggattattgcatttaattccttttatttggagggttttacttccttgttaacatataaagttataaatgaaggacaaggaggagatggaaaatgtgtatttattgttaattcttaaaatagtgtgtaaataaaataacatcagtgtgcttt

SEQ ID NO: 329 - DNA, 1637 bp, Homo sapiens
  ref <308>: DATABASE ACCESSION NUMBER: D50840
  ref <309>: DATABASE ENTRY DATE: 2001-06-18
gaggcgaaccggagcgcggggccgcggtcgccccgaccagagccgggagaccgcagcacccgcagccgcccgcgagcgcgccgaagacagcgcgcaggcgagagcgcgcgggcgggggcgcgcaggccctgcccgccccttccgtccccacccccctccgccctttcctctccccaccttcctctcgcctcccgcgcccccgcaccgggcgcccaccctgtcctcctcctgcgggagcgttgtccgtgttggcggccgcagcgggccgggccggtccggcgggccgggggatggcgctgctggacctggccttggagggaatggccgtcttcgggttcgtcctcttcttggtgctgtggctgatgcatttcatggctatcatctacacccgattacacctcaacaagaaggcaactgacaaacagccttatagcaagctcccaggtgtctctcttctgaaaccactgaaaggggtagatcctaacttaatcaacaacctggaaacattctttgaattggattatcccaaatatgaagtgctcctttgtgtacaagatcatgatgatccagccattgatgtatgtaagaagcttcttggaaaatatccaaatgttgatgctagattgtttataggtggtaaaaaagttggcattaatcctaaaattaataatttaatgccaggatatgaagttgcaaagtatgatcttatatggatttgtgatagtggaataagagtaattccagatacgcttactgacatggtgaatcaaatgacagaaaaagtaggcttggttcacgggctgccttacgtagcagacagacagggctttgctgccaccttagagcaggtatattttggaacttcacatccaagatactatatctctgccaatgtaactggtttcaaatgtgtgacaggaatgtcttgtttaatgagaaaagatgtgttggatcaagcaggaggacttatagcttttgctcagtacattgccgaagattactttatggccaaagcgatagctgaccgaggttggaggtttgcaatgtccactcaagttgcaatgcaaaactctggctcatattcaatttctcagtttcaatccagaatgatcaggtggaccaaactacgaattaacatgcttcctgctacaataatttgtgagccaatttcagaatgctttgttgccagtttaattattggatgggcagcccaccatgtgttcagatgggatattatggtatttttcatgtgtcattgcctggcatggtttatatttgactacattcaactcaggggtgtccagggtggcacactgtgtttttcaaaacttgattatgcagtcgcctggttcatccgcgaatccatgacaatatacatttttttgtctgcattatgggacccaactataagctggagaactggtcgctacagattacgctgtgggggtacagcagaggaaatcctagatgtataactacagctttgtgactgtatataaaggaaaaaagagaagtattataaattatgtttatataaatgcttttaaaaatctaccttctgtagttttatcacatgtatgttttggtatctgttctttaatttatttttgcatggcacttgcatctgtgaaaaaaaa

SEQ ID NO: 330 - DNA, 504 bp, Homo sapiens
  ref <308>: DATABASE ACCESSION NUMBER: AI651772
  ref <309>: DATABASE ENTRY DATE: 2001-06-18
gcggccgccagcggctacacggacctgcgtgagaagctcaattccatgacgtcccgggacaactataaggcgggcagccgggaggccgccgccgctgccgcagccgccgtagccgccgcagccgcagccgccgctgccgccgaaccttaccctgtgtccggggccaagcgcaagtatcaggaggactcggaccccgagcgcagcgactatgaggagcagcagctgcagaaggaggaggaggcgcgcaaggtgaagagcggcatccgccagatgcgcctcttcagccaggacgagtgcgccaagatcgaggcccgcattgacgaggtggtgtcccgcgctgagaagggcctgtacaacgagcacacggtggaccgggccccactgcgcaacaagtacttcttcggcgaaggctacacttacggcgcccagctgcagatgcgcgggcccggccaggagcgcctctacccgccgggcgacgtggacgagatccccgagtgggtgcac

SEQ ID NO: 331 - DNA, 4006 bp, Homo sapiens
  ref <308>: DATABASE ACCESSION NUMBER: U36336
  ref <309>: DATABASE ENTRY DATE: 2001-06-18
ccgattcctggcttttgcaaggctgtggtcggtggtcatcagtgctcttgacccaggtccagcgagccttttccctggtgttgcagctgttgttgtaccgccgccgtcgccgccgtcgccgcctgctctgcggggtcatggtgtgcttccgcctcttcccggttccgggctcagggctcgttctggtctgcctagtcctgggagctgtgcggtcttatgcattggaacttaatttgacagattcagaaaatgccacttgcctttatgcaaaatggcagatgaatttcacagtacgctatgaaactacaaataaaacttataaaactgtaaccatttcagaccatggcactgtgacatataatggaagcatttgtggggatgatcagaatggtcccaaaatagcagtgcagttcggacctggcttttcctggattgcgaattttaccaaggcagcatctacttattcaattgacagcgtctcattttcctacaacactggtgataacacaacatttcctgatgctgaagataaaggaattcttactgttgatgaacttttggccatcagaattccattgaatgacctttttagatgcaatagtttatcaactttggaaaagaatgatgttgtccaacactactgggatgttcttgtacaagcttttgtccaaaatggcacagtgagcacaaatgagttcctgtgtgataaagacaaaacttcaacagtggcacccaccatacacaccactgtgccatctcctactacaacacctactccaaaggaaaaaccagaagctggaacctattcagttaataatggcaatgatacttgtctgctggctaccatggggctgcagctgaacatcactcaggataaggttgcttcagttattaacatcaaccccaatacaactcactccacaggcagctgccgttctcacactgctctacttagactcaatagcagcaccattaagtatctagactttgtctttgctgtgaaaaatgaaaaccgattttatctgaaggaagtgaacatcagcatgtatttggttaatggctccgttttcagcattgcaaataacaatctcagctactgggatgcccccctgggaagttcttatatgtgcaacaaagagcagactgtttcagtgtctggagcatttcagataaatacctttgatctaagggttcagcctttcaatgtgacacaaggaaagtattctacagcccaagagtgttcgctggatgatgacaccattctaatcccaattatagttggtgctggtctttcaggcttgattatcgttatagtgattgcttacgtaattggcagaagaaaaagttatgctggatatcagactctgtaacactaatcaatacgtgatctctgttacaaaagaaaaaagcaagtacaagttccaacatgcaatactggtcaacttaaggtatatttagttgcagtccagctctttagaatgggtggtatgggggatttcaaacttaaacaaaaaactatcaactacaaattagttgcctgactttggtttttccaaccaaggaatttaaaactgttatttttacagcaaaagatgtgcaaaatcactggattataagttctattttactgtcttgaattagtatttcagtgttttcattttagacattcagactaaaaatacaccgtttagaaaaaacaatttttgaaaaagagattttttttccctgcaggtagttgagttgaacaacatgttctaccgtggatttgtacttgctccttttgctctttttgtgtgtgtgtgtgtgtgtgtgtgtgtgtgtgtgatttttgtttgcaggttaacttagctactttggcattgctgcatatttgacctttgagagatataatagtagatttgaacaggggctggtattattatgttcttagcaataaatgcttttctaatgccttttgaatacatttgtatttatgtggctgtaatgacaaaagatacaaaagctttttaaaatttagagtaggtattaatcttattgtttaatcttttttttaaaaaaactggatatttcaatcttttaaattgcaatatataagactattccaactgggcatttcaatccattttttaggtgctttagagataattgcttgccagtgccaattgagggcattagtactttgtgctcataaattggcctctgtatgcagtactaaaattaatgcagatttctctttagccttccaacatttcttgttgatagtgatgtattttattattttctttttcttaagaaatgccagtgtgtcctagaacctagataacgaagtgcacttacacttataaaataacttgcatctaggctgggcgtggcggctcacgcctgtaatcccagcactttgggaggccgaagtgggtggatcacttgaggccaggagtttgagaccagcctggccaacatggtgaaaccccatctctatcagaaatacaaaaaattagctgggcatggtggtgggcgcctgtaatcccagttactcgggaggctgaggcaggagaatcacttgaacccgggaggcagaggttgcggtgagccaagagcgcaccattgcactccagccttgggcgacaaaaacgaaactccatcttcaaaacaaaacaaaacaaaacaaacaaacaaacaaaacttgcatcttaaccaaaagtcttggttttatcttaatccattaaaagttggtcttgtttccagcttgcattgattgctacaacatcactaatttggctttcacatttaaatggttctgtgctaatcaaaactttcgttgttattattcgttatggtagaatcatttttaattcacgtgctttgtgttcagttttgtggtctgagagatgtaccaattgtcaaattaccgtgtaccacctaatgtttataggagaaagcaaaatacatcagcttggtagttaacacatcaaatatttcttgctgcttctaggagaacttttttggtgtgtgttggaatggctgagcaaatattaaaattgttaatatgcagccatatatggaaggttcctgtggggttgttttttcgtgttttttttttttgtggtgggattatgtgcctcccattcactagaaaatgagaaaattgtctgggttccaaaatattgacattgaatggatcaatacacacacacagacatatatatatatatatgcacacatatataggcagttgcatgcctagcatgggtattttataaccatataactgagttatattggaattataaatattttccgtcacttaaatttgttctttgtttagcctgaaaacctttatggctcaagatcagattcctgactaacccctctcttagagctacagcgagctgcattaccagcttaaaacacttcttagggattaaatatagatgtaatttttcaaaatcgtttttaatttaaactgtgttttagtgtaaaattgttaaccttgtaagatggataatgtgtataagaatgtaggccttaactatttcacatgagtcaaaacaaagcagctttaaaaaaataattggaagcacaatgcatggcactgactgaatgctgttaatatttctaaaagtttctacattcagattatatgcctgattcatagtaaaatacctctaataaacactgttttatagaaaacctgacttcagtgaatatttttgtattttacatgggccagtttatatactgctatttacactattatttcctatagctacatgttctttgtaccttttgtagttttatttgtattactagattcataccttgatggtaacgctctatctggttttgggtgtttttcatgttttagcatttgtataaagaaactggtccatgtaaatactttccatgttttttcttcaaatgtttaaaccactagttgatgtatggtatctttagatatttgcctgtctgtttgctcaaaattgcttctaaaacaataaagattctt

SEQ ID NO: 332 - DNA, 496 bp, Homo sapiens
  ref <308>: DATABASE ACCESSION NUMBER: AI435586
  ref <309>: DATABASE ENTRY DATE: 2001-06-18
tttttcatttaggccattaaccaggagtccatggatgggacttagtgggtccataagcccctgaaatcatatccaaatcacatgcaaaatgtcttaggtaaccacatttttctagagatcaggcaacacacatttcctcaaacaggtccattattcctcaaaaaccactgggaaacaataacaaaaatagtactataaaaatgttttcaatgctaagggataataggatggggaagagaaaggtagaaaataaagcatttgaccttcatggtaaaataatgcacactgacaggttataagctttgggggcattcctcaaaataaagaaacatttcaggaagaaaaaaatatgaatggaaagtttaaacaaaacggacaagaaggaagcagtatctgggcagtctgacagaatgaaggggaccagggcctgccaccattaaaatatttcttactgaatctcaaaatattctatacttggcccattaatgtaaaaagt

SEQ ID NO: 333 - DNA, 1346 bp, Homo sapiens
  Modified_base 1 ... 1346: n = a,c,g, or t
  ref <308>: DATABASE ACCESSION NUMBER: U66672
  ref <309>: DATABASE ENTRY DATE: 2001-06-18
cagacaatgaggatgaagatgaagatgtcaaagctgaaagactaaaggtcaaagagctgatgggttgccagtgttgtgaggagaaaccatccattatggtcagcaatttgcataaagaatatgatgacaagaaagattttcttctttcaagaaaagtaaagagagtggcaactaaatacatctctttctgtgtgaaaaaaggagagatcttaggactattgggtccaaatggtgctggcaaaagcacaattattaatattctggttagtgatattgaaccagcttcaggccaggtatttttaggagattattcttcagagacaagtgaagatgatgattcactgaagtgtatgggttactgtcctcagataaaccctttgtggccagatactacattgcaggaacattttgaaatttatggagctgtcaaaggaatgagtgcaagtgacatgaaagaagtcataagtcgaataacacatgcacttgatttaaaagaacatcttcagaagactgtaaagaaactacctgcnaggaatcaaacgaaagtgtgttttgctctaagtatgctagggaatcctcagattactttgctagatgaaccatctacaggtctggatcccaaatgccaaacatgcacatgtggcatgcaattcgaactgcatnnaagcgggctgctattctgaccactcactatatggaggaggcagaggctgtctgtgatcgagtagctatcatggtgtctgggcagttaagatgtatcggaacagtacaacatctaaagagtaaatttggaaaagnactttttggaaattaaattgaacggactggatagaaaacctagaagctagaccgccttcaaagagaaattcagtatattttcccaaatgcaagccgtcagaaagtttttcttctattttggcttctaaaattaataaggaagatgttcagtccctttcccaatctttttttaagctggaagaagctaaacatgctttgccattgaagaatatagctttctcaagcaacattggaacaggtttttgtagaactcactaaagaacaagaggaggaagataatagttgtggaactttaaacagcacactttggtggaacgaacacaagaagatagagtagtattttgaatttgtattgttcggtctgcttactgggacttctttctttttcacttaattttaactttggtttaaaaagttttttattggaatggtaactggagaaccaagaacgcacttgaaatttttctaagctccttaattgaaatgctgtggttgtgtgttttgcttttctttaaataaaacgtatgtataattaagtgaaaaaaaaa

SEQ ID NO: 334 - DNA, 2838 bp, Homo sapiens
  ref <308>: DATABASE ACCESSION NUMBER: AF085199
  ref <309>: DATABASE ENTRY DATE: 2001-06-18
cgggaggtttactcagcttgggccccctccgggccagccgccgagggggcgcggcccaggacggcggctaggccgtagtgcagcctctccggagtcctcaggtttgccaataggattatcctgctgccatcatgtcttggtttgttgatcttgctggaaaggcagaagatcttttaaaccgagttgatcaaggggctgcaacagctctcagtaggaaagacaatgccagcaacatatatagcaaaaatactgactatactgaacttcaccagcaaaatacagatttgatatatcagactggacctaaatctacgtatatttcatcagcagctgataacattcgaaatcaaaaagccaccatcttagctggcactgcaaatgtgaaagtaggatctcggacaccagtagaggcctctcatcctgttgaaaatgcatctgttcctaggccttcatcccattttgtgcgaagaaaaaagtcagaacctgatgatgagctgctgtttgattttcttaatagttcacagaaggagcctaccgggagggtggaaatcagaaaggaaaaaggcaagacacctgtctttcagagctctcagacatcaagtgtcagttctgtgaaccccagtgtaaccaccatcaaaaccattgaagaaaattcttttgggagccaaacccacgaagctgccagtaactcagattctagccatgaaggtcaagaggaatcttcaaaggaaaatgtgtcatcaaatgctgcctgccctgaccacaccccaacacctaatgatgatggcaaatcacatgaactgtctaaccttcgactggagaatcagctgctgaggaatgaagttcagtctttaaatcaagaaatggcctcgttactccaaagatccaaagagactcaagaagaattaaacaaagcaagagcaagagttgaaaagtggaatgctgaccattcaaagagtgatcgaatgactcgaggactccgagcccaagtagatgacctgactgaagctgtggctgcaaaggattcccagctggctgtactgaaagtgagactccaggaagctgaccagctactgagtactcgcacagaagcattagaagccttacagagtgaaaaatcacgaataatgcaggatcaaagtgaaggtaacagcctgcagaatcaagctctgcagactcttcaggagagactgcatgaagcggatgccactctgaagagagagcaggagagctataaacagatgcagagcgagtttgctgcacgccttaataaagtggaaatggaacgtcagaatttagcagaagcaattacactggccgaaagaaaatactcagatgagaagaagagggttgatgaactgcagcagcaagtcaagctgtataagttgaacttggagtcctctaagcaggaattaattgactacaagcaaaaagctactagaatactgcaatctaaggaaaaattgattaacagcttgaaagaaggctctggttttgaaggcctagatagcagcactgccagtagcatggagctggaagaacttcggcatgagaaagagatgcagagggaggaaatacagaagctgatgggccagatacatcagctcagatccgaattacaggatatggaggcacagcaagttaatgaagcagaatcagcaagagaacagttacaggatctgcatgaccaaatagctgggcagaaagcatccaaacaagaactagagacagaactggagcgactgaagcaggagttccactatatagaagaagatctttatcgaacaaagaacacattgcaaagcagaattaaagatcgagacgaagaaattcaaaaactcaggaatcagcttaccaataaaactttaagcaatagcagtcagtctgagttagaaaatcgactccatcagctaacagagactctcatccagaaacagaccatgctggagagtctcagcacagaaaagaactccctggtctttcaactggagcgcctcgaacagcagatgaactccgcctctggaagtagtagtaatgggtcttcgattaatatgtctggaattgacaatggtgaaggcactcgtctgcgaaatgttcctgttctttttaatgacacagaaactaatctggcaggaatgtacggaaaagttcgcaaagctgctagttcaattgatcagtttagtattcgcctgggaatttttctccgaagataccccatagcgcgagtttttgtaattatatatatggctttgcttcacctctgggtcatgattgttctgttgacttacacaccagaaatgcaccacgaccaaccatatggcaaatgaaccaagcccagttgttgcagtgattggttgtctttttctagacttgggatctgcaagaaggccaattgcctaaaatttctgagaacagtgcacaagattattttatcactacaagcttttaactttttaagttattgtacaagtattctacctaaatcttccaatttcctttaaatggtaagagtttctaaaacagacaataatttaacaagctcagctctgctttatctgagtttagtggtcctaatatatatgtagagaaagatggtggggttgttcacctctgtacagaccatctgtatgttaggtgacattgattatgggttataatcagggaaactaattgtatttagtgacaaaaataaaaagttttttttttataattcagtctgcttttggattttcatatatttaactttgcaaaaagatttactttgtacatgttacaggcttgattggtgtaaatctttttataaatacataaataaaagaaaaaaaaaaaaaaaaaaaa

SEQ ID NO: 335 - DNA, 541 bp, Homo sapiens
  Modified_base 1 ... 541: n = a,c,g, or t
  ref <308>: DATABASE ACCESSION NUMBER: AA485939
  ref <309>: DATABASE ENTRY DATE: 2001-06-18
gattttgaaggatcttttaaattaccagatttagtattgaaacagatgatacaatttaaaaatgcaattgcaatgacagaaaaagtgtggctatgcgtttatctggaagaactgaaagttacttggctctgagtacagcaccagaagccttgaggtgagagcatcccgtggggtgngggtgggggcaaggtaaggggtgcagtaaggggtaggggtttgggggcaggatgcacccctccgggtaagcactgctcttctgatggggtccatcgggagctgcgccacnccagtctcctgcctcctgagttatttcccctcccatctgtgtccagtagcacctcaaggttccctatggcagaagcgagcattctcaggcgaggctcacacctggggttctgcggcagaaatctgccccgaaacatgccgtgggaaagacaaacacatccctccgtgcacatcacagggagctcctccaccctgagccagcaaatatacaatcggctgaagaataatgaaaacatcttaaccacacattatgagc

SEQ ID NO: 336 - DNA, 488 bp, Homo sapiens
  ref <308>: DATABASE ACCESSION NUMBER: AA709067
  ref <309>: DATABASE ENTRY DATE: 2001-06-18
tttttgaactcggcagtcctttatttagatcaatgcggggctgaggggccctcattccactgcagggcaaagggggaccaggcccaaggaggcctccttctgcccaaggtctggaggcagagaggggctcgcaggcggcccgagggcgcgcatccaggccccggagcgcaaagccttcctcccagggggaggcagtttcccatccaccgaccaggtttccccggagagtcccagcacaaaagcagcagcgggcggtggcctagaaggctcagagcgcacgcagggggacacaggcggggagctcactcctgggcgagcatcctcgcgaactcctcgtagttcacccgcccgtcctggtccacgtcggcctcgcggatcatggcgtccagctcctcctgcggcagcggctgccccaggcccgccatggcccgcctgagctcgtccacggtgatgtggccgtcgccatcctggtcgaaggcgcggaaagc

SEQ ID NO: 337 - DNA, 13449 bp, Homo sapiens
  Modified_base 1 ... 13449: n = a,c,g, or t
  ref <308>: DATABASE ACCESSION NUMBER: U67615
  ref <309>: DATABASE ENTRY DATE: 2001-06-18
gcggccgcgtcgacgcggcggcggcagcggcgtcggctcggggttctccgggagagggggagtgcgcggcggccgcagctgccacaaaccaggtgaagctttgttctaagaatatttgtttcatctagtttatgagtccaaatgatatagactgtaaatgtcacagcagtggtgaaagactgctcggtcatgagcaccgacagtaactcactggcacgtgaatttctgaccgatgtcaaccggctttgcaatgcagtggtccagagggtggaggccagggaggaagaagaggaggagacgcacatggcaacccttggacagtaccttgtccatggtcgaggatttctattacttaccaagctaaattctataattgatcaggcattgacatgtagagaagaactcctgactcttcttctgtctctccttccactggtatggaagatacctgtccaagaagaaaaggcaacagattttaacctaccgctctcagcagatataatcctgaccaaagaaaagaactcaagttcacaaagatccactcaggaaaaattacatttagaaggaagtgccctgtctagtcaggtttctgcaaaagtaaatgtttttcgaaaaagcagacgacagcgtaaaattacccatcgctattctgtaagagatgcaagaaagacacagctctccacctcagattcagaagccaattcagatgaaaaaggcatagcaatgaataagcatagaaggccccatctgctgcatcattttttaacatcgtttcctaaacaagaccaccccaaagctaaacttgaccgcttagcaaccaaagaacagactcctccagatgctatggctttggaaaattccagagagattattccaagacaggggtcaaacactgacattttaagtgagccagctgccttgtctgttatcagtaacatgaacaattctccatttgacttatgtcatgttttgttatctttattagaaaaagtttgtaagtttgacgttaccttgaatcataattctcctttagcagccagtgtagtgcccacactaactgaattcctagcaggctttggggactgctgcagtctgagcgacaacttggagagtcgagtagtttctgcaggttggaccgaagaaccggtggctttgattcaaaggatgctctttcgaacagtgttgcatcttctgtcagtagatgttagtactgcagagatgatgccagaaaatcttaggaaaaatttaactgaattgcttagagcagctttaaaaattagaatatgcctagaaaagcagcctgacccttttgcaccaagacaaaagaaaacactgcaggaggttcaggaagattttgtgttttcaaagtatcgtcatagagcccttcttttacctgagcttttggaaggagttcttcagattctgatctgttgtcttcaaagtgcagcttcaaatcccttctacttcagtcaagccatggatttggttcaagaattcattcagcatcatggatttaatttatttgaaacagcagttcttcaaatggaatggctggttttaagagatggagttcctcccgaggcctcagagcatttgaaagccctaataaatagtgtgatgaaaataatgagcactgtcaaaaaagtgaaatcagagcaacttcatcattcgatgtgtacaagaaaaaggcacagacgatgtgaatattctcattttatgcatcatcaccgagatctctcaggtcttctggtttcggcttttaaaaaccaggtttccaaaaacccatttgaagagactgcagatggagatgtttattatcctgagcggtgctgttgcattgcagtgtgtgcccatcagtgcttgcgcttactacagcaggcttccttgagcagcacttgtgtccagatcctatcgggtgttcataacattggaatatgctgttgtatggatcccaaatctgtaatcattcctttgctccatgcttttaaattgccagcactgaaaaattttcagcagcatatattgaatatccttaacaaacttattttggatcagttaggaggagcagagatatcaccaaaaattaaaaaagcagcttgtaatatttgtactgttgactctgaccaactagcccaattagaagagacactgcagggaaacttatgtgatgctgaactctcctcaagtttatccagtccttcttacagatttcaagggatcctgcccagcagtggatctgaagatttgttgtggaaatgggatgctttaaaggcttatcagaactttgtttttgaagaagacagattacatagtatacagattgcaaatcacatttgcaatttaatccagaaaggcaatatagttgttcagtggaaattatataattacatatttaatcctgtgctccaaagaggagttgaattagcacatcattgtcaacacctaagcgttacttcagctcaaagtcatgtatgtagccatcataaccagtgcttgcctcaggacgtgcttcagatttatgtaaaaactctgcctatcctgcttaaatccagggtaataagagatttgtttttgagttgtaatggagtaagtcaaataatcgaattaaattgcttaaatggtattcgaagtcattctctaaaagcatttgaaactctgataatcagcctaggggagcaacagaaagatgcctcagttccagatattgatgggatagacattgaacagaaggagttgtcctctgtacatgtgggtacttcttttcatcatcagcaagcttattcagattctcctcagagtctcagcaaattttatgctggcctcaaagaagcttatccaaagagacggaagactgttaaccaagatgttcatatcaacacaataaacctattcctctgtgtggcttttttatgcgtaagtaaagaagcagagtctgacagggagtcggccaatgactcagaagatacttctggctatgacagcacagccagcgagcctttaagtcatatgctgccatgtatatctctcgagagccttgtcttgccttctcctgaacatatgcaccaagcagcagacatttggtctatgtgtcgttggatctacatgttgagttcagtgttccagaaacagttttataggcttggtggtttccgagtatgccataagttaatatttatgataatacagaaactgttcagaagtcacaaagaggagcaaggaaaaaaggagggagatacaagtgtaaatgaaaaccaggatttaaacagaatttctcaacctaagagaactatgaaggaagatttattatctttggctataaaaagtgaccccataccatcagaactaggtagtctaaaaaagagtgctgacagtttaggtaaattagagttacagcatatttcttccataaatgtggaagaagtttcagctactgaagccgctcccgaggaagcaaagctatttacaagtcaagaaagtgagacctcacttcaaagtatacgacttttggaagcccttctggccatttgtcttcatggtgccagaactagtcaacagaagatggaattggagttacctaatcagaacttgtctgtggaaagtatattatttgaaatgagggaccatctttcccagtcaaaggtgattgaaacacaactagcaaagccgttatttgatgccctgcttcgagttgccctcgggaattattcagcagattttgaacataatgatgctatgactgagaagagtcatcaatctgcagaagaattgtcatcccagcctggtgatttttcagaagaagctgaggattctcagtgttgtagttttaaacttttagttgaagaagaaggttacgaagcagatagtgaaagcaatcctgaagatggcgaaacccaggatgatggggtagacttaaagtctgaaacagaaggtttcagtgcatcaagcagtccaaatgacttactcgaaaacctcactcaaggggaaataatttatcctgagatttgtatgctggaattaaatttgctttctgctagtaaagccaaacttgatgtgcttgcccatgtatttgagagttttttgaaaattattaggcagaaagaaaagaatgtttttctgctcatgcaacagggaactgtgaaaaatcttttaggagggttcttgagtattttaacacaggatgattctgattttcaagcatgccagagagtattggtggatcttttggtatctttgatgagttcaagaacatgttcagaagagctaacccttcttttgagaatatttctggagaaatctccttgtacaaaaattcttcttctgggtattctgaaaattattgaaagtgatactactatgagcccttcacagtatctaaccttccctttactgcacgctccaaatttaagcaacggtgtttcatcacaaaagtatcctgggattttaaacagtaaggccatgggtttattgagaagagcacgagtttcacggagcaagaaagaggctgatagagagagttttccccatcggctgctttcatcttggcacatagccccagtccacctgccgttgctggggcaaaactgctggccacacctatcagaaggtttcagtgtttccctgtggtttaatgtggagtgtatccatgaagctgagagtactacagaaaaaggaaagaagataaagaaaagaaacaaatcattaattttaccagatagcagttttgatggtacagagagcgacagaccagaaggtgcagagtacataaatcctggtgaaagactcatagaagaaggatgtattcatataatttcactgggatccaaagcgttgatgatccaagtgtgggctgatccccacaatgccactcttatctttcgtgtgtgcatggattcaaatgatgacatgaaagctgttttactagcacaggttgaatcacaggagaatattttcctcccaagcaaatggcaacatttagtactcacctacttacagcagccccaagggaaaaggaggattcatgggaaaatctccatatgggtctctggacagaggaagcctgatgttactttggattttatgcttccaagaaaaacaagtttgtcatctgatagcaataaaacattttgcatgattggccattgtttatcatcccaagaagagtttttgcagttggctggaaaatgggacctgggaaatttgcttctcttcaacggagctaaggttggttcacaagaggccttttatctgtatgcttgtggacccaaccatacatctgtaatgccatgtaagtatggcaagccagtcaatgactactccaaatatattaataaagaaattttgcgatgtgaacaaatcagagaactttttatgaccaagaaagatgtggatattggtctcttaattgaaagtctttcagttgtttatacaacttactgtcctgctcagtataccatctatgaaccagtgattagacttaaaggtcaaatgaaaacccaactctctcaaagacccttcagctcaaaagaagttcagagcatcttattagaacctcatcatctaaagaatctccaacctactgaatataaaactattcaaggcattctgcacgaaattggtggaactggcatatttgtttttctctttgccagggttgttgaactcagtagctgtgaagaaactcaagcattagcactgcgagttatactctcattaattaaatacaaccaacaaagagtacatgaattagaaaattgtaatggactttctatgattcatcaggtgttgatcaaacaaaaatgcattgttgggttttacattttgaagacccttcttgaaggatgctgtggtgaagatattatttatatgaatgagaatggagagtttaagttggatgtagactctaatgctataatccaagatgttaagctgttagaggaactattgcttgactggaagatatggagtaaagcagagcaaggtgtttgggaaactttgctagcagctctagaagtcctcatcagagcagatcaccaccagcagatgtttaatattaagcagttattgaaagctcaagtggttcatcactttctactgacttgtcaggttttgcaggaatacaaagaggggcaactcacacccatgccccgagaggtttgtagatcatttgtgaaaattatagcagaagtccttggatctcctccagatttggaattattgacaattatcttcaatttccttttagcagttcaccctcctactaatacttacgtttgtcacaatcccacgaacttctacttttctttgcacatagatggcaagatctttcaggagaaagtgcggtcaatcatgtacctgaggcattccagcagtggaggaaggtcccttatgagccctggatttatggtaataagcccatctggttttactgcttcaccatatgaaggagagaattcctctaatattattccacaacagatggccgcccatatgctgcgttctagaagcctaccagcattccctacttcttcactactaacgcaatcacaaaaactgactggaagtttgggttgtagtatcgacaggttacaaaatattgcagatacttatgttgccacccaatcaaagaaacaaaattctttggggagttccgacacactgaaaaaaggcaaagaggacgcattcatcagtagctgtgagtctgcaaaaactgtttgtgaaatggaagctgtcctctcagcccaggtctctgtcagtgatgtcccaaagggagtgctgggatttccagtggtcaaagcagatcataaacagttgggagcagaacccaggtcagaagatgacagtcctggggatgagtcctgcccacgccgacctgattacctaaagggattggcctccttccagcgaagccacagcactattgcaagccttgggctagcttttccttcacagaacggatctgcagctgttggccgttggccaagtcttgttgatagaaacactgatgattgggaaaactttgcctattctcttggttatgagccaaattacaaccgaactgcaagtgctcacagtgtaactgaagactgtttggtacctatatgctgtggattatatgaactcctaagtggggttcttcttatcctgcctgatgttttgcttgaagatgtgatggacaagcttattcaagcagatacacttttggtcctcgttaaccacccatcaccagctatacaacaaggtgttattaaactattagatgcatattttgctagagcatctaaggaacaaaaagataaatttctgaagaatcgtggattttccttgctagccaaccagttgtatcttcatcgaggaactcaagaattgttagaatgcttcatcgaaatgttctttggtcgacatattggccttgatgaagaatttgatctggaagatgtgagaaacatgggattgtttcagaagtggtctgtcattcctattctgggactaatagagacctctctatatgacaacatactcttgcataatgctcttttacttcttctccaaattttaaattcttgttctaaggtagcagatatgttgctggataatggtctactctatgtgttatgtaatacagtagcagccctgaatggattagaaaagaacattcccatgagtgaatataaattgcttgcttgtgatatacagcaacttttcatagcagttacaattcatgcttgcagttcctcaggctcacaatattttagggttattgaagaccttattgtaatgcttggatatcttcaaaatagcaaaaacaagaggacacaaaatatggctgttgcactacagcttagagttctccaggctgctatggaatttataaggaccaccgcaaatcatgactctgaaaacctcacagattcactccagtcaccttctgctccccatcatgcagtagttcaaaagcggaaaagcattgctggtcctcgaaaatttccccttgctcaaactgaatcgcttctgatgaaaatgcgttcagtggcaaatgatgagcttcatgtgatgatgcaacggagaatgagccaagagaaccctagccaagcaactgaaacggaacttgcgcagagactacagaggctcactgttttagcagtcaacaggattatttatcaagaatttaattcagacattattgacattttgagaactccagaaaatgtaactcaaagcaagacctcagttttccagaccgaaatttctgaggaaaatattcatcatgaacagtcttctgttttcaatccatttcagaaagaaatttttacatatctggtagaaggattcaaagtatctattggttcaagtaaagccagtggttccaagcagcaatggactaaaattctgtggtcttgtaaggagaccttccgaatgcagcttgggagactactagtgcatattttgtcgccagcccacgctgcacaagagagaaagcaaatttttgaaatagttcatgaaccaaatcatcaggaaatactacgagactgtctcagcccatccctacaacatggagccaagttagttttgtatttgtcagagttgatacataatcaccaaggtgaattgactgaagaagagctaggcacagcagaactgcttatgaatgctttgaagttatgtggtcacaagtgcatccctcccagtgcatcaacaaaagcagaccttattaaaatgatcaaagaggaacaaaagaaatatgaaactgaagaaggagtgaataaagctgcttggcagaaaacagttaacaataatcaacaaagtctctttcagcgtctggattcaaaatcaaaggatatatctaaaatagctgcagatatcacccaggcagtgtctctctcccaaggaaatgagagaaaaaaggtgatccagcatattagaggaatgtataaagtagatttgagtgccagcagacattggcaggaacttattcagcagctgacacatgatagagcagtatggtatgaccccatctactatccaacctcatggcagttggatccaacagaagggccaaatcgagagaggagacgtttacagagatgttatttaactattccaaataagtatctccttagggatagacagaaatcagaagatgttgtcaaaccaccactctcttacctgtttgaagacaaaactcattcttctttctcttctactgtcaaagacaaagctgcaagtgaatctataagagtgaatcgaagatgcatcagtgttgcaccatctagagagacagctggtgaattgttactaggtaaatgtggaatgtattttgtggaagataatgcttctgatacagttgaaagttcgagccttcagggagagttggaaccagcatcattttcctggacatatgaagaaattaaagaagttcacaagcgttggtggcaattgagagataatgctgtagaaatctttctaacaaatggcagaacactcctgttggcatttgataacaccaaggttcgtgatgatgtataccacaatatactcacaaataacctccctaatcttctggaatatggtaacatcaccgctctgacaaatttatggtatactgggcaaattactaattttgaatatttgactcacttaaacaaacatgctggccgatccttcaatgatctcatgcagtatcctgtgttcccatttatacttgctgactacgttagtgagacacttgacctcaatgatctgttgatatacagaaatctctctaaacctatagctgttcagtataaagaaaaagaagatcgttatgtggacacatacaagtacttggaggaagagtaccgcaaaggagccagagaagatgaccccatgcctcccgtgcagccctatcactatggctcccactattccaatagcggcactgtgcttcacttcctggtcaggatgcctcctttcactaaaatgtttttagcctatcaagatcaaagttttgacattccagacagaacttttcattctacaaatacaacttggcgactctcatcttttgaatctatgactgatgtgaaagaacttatcccagagtttttctatcttccagagttcctagttaaccgtgaaggttttgattttggtgtgcgtcagaatggtgaacgggttaatcacgtcaaccttcccccttgggcgcgtaatgatcctcgtctttttatcctcatccatcggcaggctctagagtctgactacgtgtcgcagaacatctgtcagtggattgacttggtgtttgggtataagcaaaaggggaaggcttctgttcaagcgatcaatgtttttcatcctgctacatattttggaatggatgtctctgcagttgaagatccagttcagagacgagcgctagaaaccatgataaaaacctacgggcagactccccgtcagctgttccacatggcccatgtgagcagacctggagccaagctcaatattgaaggagagcttccagctgctgtggggttgctagtgcagtttgctttcagggagacccgagaacaggtcaaagaaatcacctatccgagtcctttgtcatggataaaaggcttgaaatggggggaatacgtgggttcccccagtgctccagtacctgtggtctgcttcagccagccccacggagaaagatttggctctctccaggctctgcccaccagagcaatctgtggtttgtcacggaatttctgtcttgtgatgacatatagcaaggaacaaggtgtgagaagcatgaacagtacggacattcagtggtcagccatcctgagctggggatatgctgataatattttaaggttgaagagtaaacaaagtgagcctccagtaaactttattcaaagttcacaacagtaccaggtgactagttgtgcttgggtgcctgacagttgccagctgtttactggaagcaaatgcggtgtcatcacagcctacacaaacagatttacaagcagcacgccatcagaaatagaaatggagactcaaatacatctctatggtcacacagaagagataaccagcttatttgtttgcaaaccatacagtatactgataagtgtgagcagagacggaacctgcatcatatgggatttaaacaggttatgctatgtacaaagtctggcgggacacaaaagccctgtcacagctgtctctgccagtgaaacctcaggtgatattgctactgtgtgtgattcagctggcggaggcagtgacctcagactctggacggtgaacggggatctcgttggacatgtccactgcagggagatcatctgttccgtggctttctccaaccagcctgagggagtatctatcaatgtaatcgctgggggattagaaaatggaattgtaaggttatggagcacatgggacttaaagcctgtgagagaaattacatttcccaaatcaaataagcccatcatcagccttacattttcttgtgatggccaccatttgtacacagcaaacagtgatgggaccgtgattgcctggtgtcggaaggaccagcagcgcttgaaacagccaatgttctattccttccttagcagctatgcagccgggtgaatgcgaatgaacttcacgttctccaaagcactttaactccaaactagatttgttgacttcaccagttttaggaggttgaacctaaagaaatggatgactggacaaaccatccaaataatgataaagtctattcatctgcacaaaattctgaagagtcacatgatcctaagaggaaagttctgttctattttagtgataatctggaagattgtgtcaatatgcactagccaacaagttttaagcctcgcatggtacattaaaatgatattcttaaaattttttcccaccaaggtattccaaagaaaatattaaggtctcccctttttctatgattccaaaaggaccagtagaatttaaattggttggttgatngtttatataaaacacactaaaattatattttaaaagtttantgccntgaaatactcctcccaccacacacacatgctccaaaagaggaaagaaaaaaagataatttttaggacttgataattgctttctttgagaagcaaattattcagtaggtgcctctgtaccaaatattttatggaatatctaaatactaaaataaactatgaatgaatctcaaaattaggcagtttttgccagttgctttcttagctcaaaggagaaccagaatttttttgacagccacaaacaagaatacaggtatcttggatttcagacacattctgtttcttcataaaaattttacttaaaatctgtaacgctagatattgactatccttagttgagtcactgaggtttaaacacaatggtaagtcttaaagtctgctatttacagagcattgaatctgtaccaatttgcaatagaaagccttcagtatgcaagaagtttgcatgggtattaagaacacagcctaaataaggcatttgatctaatctgcaggaagaattttcttccccaaaacagaattataaaagcttactttaaacaggaggcagaataattcttttaggaaaccatttcattctgtttctactaacctataccatctgagaattcctaaacatcttggagccgtctgtctctcccatatgatggctgtctgtatatttttacttggggtgctgctttattggctttgaaaacactgtcagataagctcagtaatatgttaccatgggataaaaatatgtatccctgcctaagaataacttgtgcatttgttatggaaatttaattcatatggtgtttacagtactacttttgtaacttccagactttctaaaacattctgcttaaaaaccatataaaatataattccaaagtctctgctgtcaagatagattcgagagaaagcacgtggccatgtatgctttaaccttaaactgcatacacatgtagtgatacctaggctgcatttagatcaccgtgtgctcaggccaggtgtgaatcctgaggtccatggaggtgcagagatgagattactcctattcacgttgaagtgatttgctttgttaacaaaaaattgcagctattgtctagctttcatttttttactgagaactttaaattagtcccctattagaatagggttgctactcatctttttttaaaaaccgaatttcatcatttatctaaagagaaaatatgcagaataactggtcttgttaagagtgcaatattatatttttatgtaaaaataaaaattaatttggggggattatttattcagcatgaaacctaatatgtatatgtttgaaatacttcataatgtgcatgttgtagcaaacatttctgtaaattatcacaagctctgttacctttatatacgctgcctcttcaatttggaaataaatttcataaaaaaaaaaaaaaaaaaaaaaaaa

SEQ ID NO: 338 - DNA, 1573 bp, Homo sapiens
  ref <308>: DATABASE ACCESSION NUMBER: X71125
  ref <309>: DATABASE ENTRY DATE: 2001-06-18
ggctgggagagatggcaggcggaagacaccggcgcgtcgtgggcaccctccacctgctgctgctggtggccgccctgccctgggcatccaggggggtcagtccgagtgcctcagcctggccagaggagaagaattaccaccagccagccattttgaattcatcggctcttcggcaaattgcagaaggcaccagtatctctgaaatgtggcaaaatgacttacagccattgctgatagagcgatacccgggatcccctggaagctatgctgctcgtcagcacatcatgcagcgaattcagaggcttcaggctgactgggtcttggaaatagacaccttcttgagtcagacaccctatgggtaccggtctttctcaaatatcatcagcaccctcaatcccactgctaaacgacatttggtcctcgcctgccactatgactccaagtatttttcccactggaacaacagagtgtttgtaggagccactgattcagccgtgccatgtgcaatgatgttggaacttgctcgtgccttagacaagaaactcctttccttaaagactgtttcagactccaagccagatttgtcactccagctgatcttctttgatggtgaagaggcttttcttcactggtctcctcaagattctctctatgggtctcgacacttagctgcaaagatggcatcgaccccgcacccacctggagcgagaggcaccagccaactgcatggcatggatttattggtcttattggatttgattggagctccaaacccaacgtttcccaatttttttccaaactcagccaggtggttcgaaagacttcaagcaattgaacatgaacttcatgaattgggtttgctcaaggatcactctttggaggggcggtatttccagaattacagttatggaggtgtgattcaggatgaccatattccatttttaagaagaggtgttccagttctgcatctgataccgtctcctttccctgaagtctggcacaccatggatgacaatgaagaaaatttggatgaatcaaccattgacaatctaaacaaaatcctacaagtctttgtgttggaatatcttcatttgtaatactctgatttagtttaggataattggttctagaattgaattcaaaagtcaaggcatcatttaaaataatctgatttcagacaaatgctgtgtggaaacatctatcctatagatcatcctattcttatgtgtctttggttatcagatcaattacagaataattgtgttgtgatattgtgtcctaaattgctcattaatttttatttacagattgaaaaagaggcaccgtgtaaagaaaatggcaaaataaatatctttccaaggatcatcatcacgatagctaaacagtacttaaatagcggttggaactaggtagcctttcgaattttatgattttttcatatgtggaaatctattacatgtaatacaaaacaaacatgtagtttgaaggcggtcagatttctttgagaaatctttgtagagttaattttatggaaattaaaatcagaattaaatgctaaaaaaaaaaaaaaaaa

SEQ ID NO: 339 - DNA, 2910 bp, Homo sapiens
  ref <308>: DATABASE ACCESSION NUMBER: X69910
  ref <309>: DATABASE ENTRY DATE: 2001-06-18
gggggagcccctgcaagtttcccgggccgcgcgccgcgctcgctcgcctcccagcccgcggcccgagccgccgccgcgcccgccatgccctcggccaaacaaaggggctccaagggcggccacggcgccgcgagcccctcggagaagggtgcccacccgtcgggcggcgcggatgacgtggcgaagaagccgccgccggcgccgcagcagccgccgccgccgcccgcgccgcacccgcagcagcacccgcagcagcacccgcagaaccaggcgcacggcaagggcggccaccgcggcggcggcggcggcggcggcaagtcctcctcctcctcctccgcctccgccgccgctgccgccgccgccgcctcgtcctcggcgtcctgctcgcgcaggctcggcagggcgctcaactttctcttctacctcgccctggtggcggcggccgctttctcgggctggtgcgtccaccacgtcctggaggaggtccagcaggtccggcgcagccaccaggacttctcccggcagagggaggagctgggccagggcttgcagggcgtcgagcagaaggtgcagtctttgcaagccacatttggaacttttgagtccatcttgagaagctcccaacataaacaagacctcacagagaaagctgtgaagcaaggggagagtgaggtcagccggatcagcgaagtgctgcagaaactccagaatgagattctcaaagacctctcggatgggatccatgtggtgaaggacgcccgggagcgggacttcacgtccctggagaacacggtggaggagcggctgacggagctcaccaaatccatcaacgacaacatcgccatcttcacagaagtccagaagaggagccagaaggagatcaatgacatgaaggcaaaggttgcctccctggaagaatctgaggggaacaagcaggatttgaaagccttaaaggaagctgtgaaggagatacagacctcagccaagtccagagagtgggacatggaggccctgagaagtacccttcagactatggagtctgacatctacaccgaggttcgcgagctggtgagcctcaagcaggagcagcaggctttcaaggaggcggccgacacggagcggctcgccctgcaggccctcacggagaagcttctcaggtctgaggagtccgtctcccgcctcccggaggagatccggagactggaggaagagctccgccagctgaagtccgattcccacgggccgaaggaggacggaggcttcagacactcggaagcctttgaggcactccagcaaaagagtcagggactggactccaggctccagcacgtggaggatggggtgctctccatgcaggtggcttctgcgcgccagaccgagagcctggagtccctcctgtccaagagccaggagcacgagcagcgcctggcccctgcaggggccctggaaggcctcgggtcctcagaggcagaccaggatggcctggccagcacggtgaggagcctgggcgagacccagctggtgctctacggtgacgtggaggagctgaagaggagtgtgggcgagctccccagcaccgtggaatcactccagaaggtgcaggagcaggtgcacacgctgctcagtcaggaccaagcccaggccgcccgtctgcctcctcaggacttcctggacagactttcttctctagacaacctgaaagcctcagtcagccaagtggaggcggacttgaaaatgctcaggactgctgtggacagtttggttgcatactcggtcaaaatagaaaccaacgagaacaatctggaatcagccaagggtttactagatgacctgaggaatgatctggataggttgtttgtgaaagtggagaagattcacgaaaaggtctaaatgaattgcgtgtgcagggcgcggatttaaagtccaatttctcatgaccaaaaaatgtgtggttttttcccatgtgtcccctaccccccaatttcttgtcccctcttaaagagcagttgtcaccacctgaacaccaaggcattgtattttcatgcccagttaacttatttacaatatttaagttctctgcttctgcatttggttggtttcctgaagcgcagcccctgtgaataacaggtggcttttcatggatgtctctagtcagagaaaaatgataaaggcttaaattgaggattaacagaagcagattaacctcagaaatcctgtctggctggcagatttcaagtaaaaaaaaaaaaaaggtgggttggggggacccttttctttctagttgtctttaaggaaaattaattttacttttttttttgttctggccgaaatttttatgagatatctctcacttgtcttccactttgaaccggttaaagctcatagctgtcagctctgaatgaggaggggagaagcccctgggtctttctttgaaaggaatccgctgcttgagggctgcctccctcatggtgtgcgtgtcgttctcttcctgacgcatctgtgatatcagaggtaactatgcaaagcatccaggcggttctgaatgtgaagcactacacccagcagagtcccggtgccctctgtccccactgccggcccatgtcctctctccggaggtcaccaaggaatgcacaggtttcgactaccagaaaggggagtccttgggttctttcaaaaaattcgtgaggagagctgtctacagtggaatagggggtctccctggggaatgcaggccaagtccttttattttaacatgatgtccatgaagaggtttgccgtctgggcagccctgtcggcaaggagcgtgcatactgcgtttgtgtaattgtttgctgtatctcccttccctctgagctgtattgttctttaatggctgtcttgcccttccaaaaaaaattgaaaaaaaaaaaa

SEQ ID NO: 340 - DNA, 6719 bp, Homo sapiens
  ref <308>: DATABASE ACCESSION NUMBER: AF051850
  ref <309>: DATABASE ENTRY DATE: 2001-06-18
tcggcgggaagcggcgatcctgccaccgggaggtgtggaagagccgggtagattctggctacattggagattggttgctttctaaaactgaaggagaagcccatgaagagatggtggattctcactgagttttgactagcggaagaaaagagagagttcaagtggatggccttgaggacttgaaaagctgagatatgatgattttgaagtcatttcacatcgaagccatgatttaaatatcggcgttaagatttcaacaagaaaaacttaagcttccttggattcccacgtcaaaggaaagtttcaagctttcagaaggagttctcactcgaagataaagaacagctcgctaaccacgaaagaggaatcgatgctcagcttttagttgcacttcctaaagttgcagaattaagacaaatctttgaaccaaagaagaaagaattcttagaaatgaaaagaaaagaaagaattgccaggcgcctggaagggattgaaaatgacactcagcccatcctcttgcagagctgcacaggattggtgactcaccgcctgctggaggaagacacccctcgatacatgagagccagcgaccctgccagcccccacatcggccgatcaaatgaagaggaggaaacttctgattcttctctagaaaagcaaactcgatccaaatactgcacagaaacctccggtgtccacggtgactcaccctatggttcgggtaccatggacacccacagtctggagtccaaagccgaaagaattgcaaggtacaaagcagaaagaaggcgacagctggcagagaagtatgggctgactctggatcccgaggccgactccgagtatttatcccgctataccaagtccaggaaggagcctgatgctgtcgagaagcggggaggaaaaagtgacaaacaggaagagtcaagcagagatgcgagttctctgtaccccgggaccgagacgatggggctcaggacctgtgccggtgaatccaaggactatgccctccatgcgggtgacggctcttccgacccggaggtgctgctgaacatagaaaaccaaagacgaggtcaagagctgagtgccacccggcaggcccatgacctgtccccagcagccgagagttcctcgaccttctctttctctgggcgagactcctccttcactgaagtgccacggtcccccaagcacgcccacagctcctccctgcagcaggcagcctcccggagcccctcctttggtgacccacagctatcccctgaggcccgacccaggtgcacttcacattcagaaacgccaactgtcgatgatgaagaaaaggtggatgaacgagccaagctgagcgtcgccgccaagaggttgcttttcagggagatggaaaaatcttttgatgaacaaaatgttccaaagcgacgctcaagaaacacagctgtggagcagaggctacgccgtctgcaggacaggtccctcacccagcccatcaccactgaagaggtggtcatcgcagccacattgcaggcctctgctcaccaaaaggccttagccaaggaccagacaaatgagggcaaagagcttgctgagcaaggagaacctgattcctccactctaagcttggccgaaaagttggccttgtttaacaaattgtcccagccagtctcaaaagcgatttctacccggaacagaatagacacgagacagaggagaatgaacgctcgctatcaaactcagccagtcacactgggagaggtggagcaggtgcagagtggaaagctcattcctttctcacctgccgtgaacacatcagtgtctaccgtagcatccacggttgctccaatgtatgccggagatcttcgcacaaagccacctcttgaccacaatgcaagtgccactgactataagttttcttcttcaatagaaaattcggactctccagttagaagcattctgaaatcgcaagcttggcagcctttggtagagggtagcgagaacaagggaatgttgagagaatatggagagacagaaagcaagagagctttgacaggtcgagacagtgggatggagaagtatgggtcctttgaggaagcagaagcatcctaccccatcctgaacagagccagggaaggagacagccataaggaatctaaatatgctgttcccagaagaggaagcctggaacgggcgaaccctcccatcacccacctcggggatgaaccgaaggaattttccatggctaaaatgaatgcacaaggaaacttggacttgagggacaggctgccctttgaagagaaggtggaggtggagaatgttatgaaaaggaagttttcactaagagcggcagagttcggggagcccacttccgagcagacggggacagctgctgggaaaactattgctcaaaccacagcccccgtgtcctggaagccccaggattcttcggaacagccacaggagaagctctgcaagaatccatgtgcgatgtttgctgctggagagatcaaaacgccgacaggggagggccttcttgactcacccagcaaaaccatgtctattaaagaaagattggcactgttgaagaaaagcggggaggaagattggagaaacagactcagcaggaggcaggagggcggcaaggcgccggccagcagcctgcacacccaggaagcagggcggtccctcatcaagaagcgggtcacagaaagtcgagagagccaaatgacgattgaggagaggaagcagctcatcactgtgagagaggaggcctggaagacgagaggcagaggagcggccaacgactcgacccagttcactgtggctggcaggatggtgaagaaaggtttggcgtcacctactgccataaccccagtagcctcagccatttgcggtaaaacaagaggcaccacacccgtttccaaacccctggaagatatcgaagccagaccagatatgcagttagaatcggacctgaagttggacaggctggaaacctttctaagaaggctgaataacaaagttggcgggatgcacgaaacggtgctcactgtcaccggcaaatctgtgaaggaggtgatgaagccagatgatgatgaaacctttgccaaattttaccgcagcgtggattataatatgccaagaagtcctgtggagatggatgaggacttcgatgtcattttcgatccttatgcacccaaattgacgtcttccgtggccgagcacaagcgggcagttaggcccaagcgccgggttcaggcctccaaaaaccccctgaaaatgctggcggcaagagaagatctccttcaggaatacactgagcagagattaaacgttgccttcatggagtcaaagcggatgaaagtagaaaagatgtcttccaactccaacttctcagaagtcaccctggcgggtttagccagtaaagaaaacttcagcaacgtcagcctgcggagcgtcaacctgacggaacagaactctaacaacagcgccgtgccctacaagaggctgatgctgttgcagattaaaggaagaagacatgtgcagaccaggctggtggaacctcgagcttcggcgctcaacagtggggactgcttcctcctgctctctccccactgctgcttcctgtgggtaggagagtttgcaaacgtcatagaaaaggcgaaggcctcagaacttgcaactttaattcagacaaagagggaacttggttgtagagctacttatatccaaaccattgaagaaggaattaatacacacactcatgcagccaaagacttctggaagcttctgggtggccaaaccagttaccaatctgctggagacccaaaagaagatgaactctatgaagcagccataatagaaactaactgcatttaccgtctcatggatgacaaacttgttcctgatgacgactactgggggaaaattccgaagtgctcccttctgcaacccaaagaggtactggtgtttgattttggtagtgaagtttacgtatggcatgggaaagaagtcacattagcacaacgaaaaatagcatttcagctggcaaagcacttatggaatggaacctttgactatgagaactgtgacatcaatcccctggatcctggagaatgcaatccgcttatccccagaaaaggacaggggcggcccgactgggcgatatttgggagacttactgaacacaatgagacgattttgttcaaagagaagtttctggattggacggaactgaagagatcgaatgagaagaaccccggggaacttgcccagcacaaggaagaccccaggactgatgtcaaggcatacgatgtgacacggatggtgtccatgccccagacgacagcaggcaccatcctggacggagtgaacgtcggccgtggctatggcctggtggaaggacacgacaggaggcagtttgagatcaccagcgtttccgtggatgtctggcacatcctggaattcgactatagcaggctccccaaacaaagcatcgggcagttccatgagggggatgcctatgtggtcaagtggaagttcatggtgagcacggcagtgggaagtcgccagaagggagagcactcggtgagggcagccggcaaagagaagtgcgtctacttcttctggcaaggccggcactccaccgtgagtgagaagggcacgtcggcgctgatgacggtggagctggacgaggaaaggggggcccaggtccaggttctccagggaaaggagcccccctgtttcctgcagtgtttccagggggggatggtggtgcactcggggaggcgggaagaggaagaagaaaatgtgcaaagtgagtggcggctgtactgcgtgcgtggagaggtgcccgtggaagggaatttgctggaagtggcctgtcactgtagcagcctgaggtccagaacttccatggtggtgcttaacgtcaacaaggccctcatctacctgtggcacggatgcaaagcccaggcccacacgaaggaggtcggaaggaccgctgcgaacaagatcaaggaacaatgtcccctggaagcaggactgcatagtagcagcaaagtcacaatacacgagtgtgatgaaggctccgagccactcggattctgggatgccttaggaaggagagacaggaaagcctacgattgcatgcttcaagatcctggaagttttaacttcgcgccccgcctgttcatcctcagcagctcctctggggattttgcagccacagagtttgtgtaccctgcccgagccccctctgtggtcagttccatgcccttcctgcaggaagatctgtacagcgcgccccagccagcacttttccttgttgacaatcaccacgaggtgtacctctggcaaggctggtggcccatcgagaacaagatcactggttccgcccgcatccgctgggcctccgaccggaagagtgcgatggagactgtgctccagtactgcaaaggaaaaaatctcaagaaaccagcccccaagtcttaccttatccacgctggtctggagcccctgacattcaccaatatgtttcccagctgggagcacagagaggacatcgctgagatcacagagatggacacggaagtttccaatcagatcaccctcgtggaagacgtcttagccaagctctgtaaaaccatttacccgctggccgacctcctggccaggccactcccggagggggtcgatcctctgaagcttgagatctatctcaccgacgaagacttcgagtttgcactagacatgacgagggatgaatacaacgccctgcccgcctggaagcaggtgaacctgaagaaagcaaaaggcctgttctgagtggggagacgccagaggagcctcacggtcacgtccaacaacaccactgcaccagggaaatggatatatatttttggactggtgtttttcacaaagtatttttcaatcagagttttcagaacctgacattgttaaagatactgcttgtcccggagttgtgtattttgtaaatgttcaagggaactgtttggaaacttctttccaccattcaggaggttatcagaattaataaaagtatctgttatgtgcacttaagccgcagctgctatagatagcactgccttcttgttccagctaggcaatgcctttttttttttttttgaagcagttctctttataaagtgttattttgatagtttgtggattctaaaatatatatatatttatataaacaccatataagtcaaatatgtatttaacaaagcaatatgtattcattcactttcaagatttgttttggtgtcaaaataacatgaaaaggtagatggagttgcttctgttgaattagctctgccaccaatatgtatcttcatacacgtttggaaatgtttcctgcagcattaggtatgacttgttctgagtactgcttccggtgctaaaatgaacaaagaatttgtacttaatggcatggactctggagaatctatgcgaatcaacctttctaccttaatatctccccaaaaatgtatagtgccttgtttttatgtacagtttatatacagaaaagtttgctctgcatttttgatgatggtttggaacattatctacaattttactctcaaatagtcaaaataaaaacatctcaatttctaataccggttgtaaacaaacagtacacatgtcattttgtgatataggactcccaaataaaagtatcagaataaacacaacaattaactggt

SEQ ID NO: 341 - DNA, 3464 bp, Homo sapiens
  ref <308>: DATABASE ACCESSION NUMBER: X16354
  ref <309>: DATABASE ENTRY DATE: 2001-06-18
cagccgtgctcgaagcgttcctggagcccaagctctcctccacaggtgaagacagggccagcaggagacaccatggggcacctctcagccccacttcacagagtgcgtgtaccctggcaggggcttctgctcacagcctcacttctaaccttctggaacccgcccaccactgcccagctcactactgaatccatgccattcaatgttgcagaggggaaggaggttcttctccttgtccacaatctgccccagcaactttttggctacagctggtacaaaggggaaagagtggatggcaaccgtcaaattgtaggatatgcaataggaactcaacaagctaccccagggcccgcaaacagcggtcgagagacaatataccccaatgcatccctgctgatccagaacgtcacccagaatgacacaggattctacaccctacaagtcataaagtcagatcttgtgaatgaagaagcaactggacagttccatgtatacccggagctgcccaagccctccatctccagcaacaactccaaccctgtggaggacaaggatgctgtggccttcacctgtgaacctgagactcaggacacaacctacctgtggtggataaacaatcagagcctcccggtcagtcccaggctgcagctgtccaatggcaacaggaccctcactctactcagtgtcacaaggaatgacacaggaccctatgagtgtgaaatacagaacccagtgagtgcgaaccgcagtgacccagtcaccttgaatgtcacctatggcccggacacccccaccatttccccttcagacacctattaccgtccaggggcaaacctcagcctctcctgctatgcagcctctaacccacctgcacagtactcctggcttatcaatggaacattccagcaaagcacacaagagctctttatccctaacatcactgtgaataatagtggatcctatacctgccacgccaataactcagtcactggctgcaacaggaccacagtcaagacgatcatagtcactgagctaagtccagtagtagcaaagccccaaatcaaagccagcaagaccacagtcacaggagataaggactctgtgaacctgacctgctccacaaatgacactggaatctccatccgttggttcttcaaaaaccagagtctcccgtcctcggagaggatgaagctgtcccagggcaacaccaccctcagcataaaccctgtcaagagggaggatgctgggacgtattggtgtgaggtcttcaacccaatcagtaagaaccaaagcgaccccatcatgctgaacgtaaactataatgctctaccacaagaaaatggcctctcacctggggccattgctggcattgtgattggagtagtggccctggttgctctgatagcagtagccctggcatgttttctgcatttcgggaagaccggcagggcaagcgaccagcgtgatctcacagagcacaaaccctcagtctccaaccacactcaggaccactccaatgacccacctaacaagatgaatgaagttacttattctaccctgaactttgaagcccagcaacccacacaaccaacttcagcctccccatccctaacagccacagaaataatttattcagaagtaaaaaagcagtaatgaaacctgtcctgctcactgcagtgctgatgtatttcaagtctctcaccctcatcactaggagattcctttcccctctagggtagaggggtggggacagaaacaactttctcctactcttccttcctaataggcatctccaggctgcctggtcactgcccctctctcagtgtcaatagatgaaagtacattgggagtctgtaggaaacccaaccttcttgtcattgaaatttggcaaagctgactttgggaaagagggaccagaacttcccctcccttccccttttcccaacctggacttgttttaaacttgcctgttcagagcactcattccttcccacccccagtcctgtcctatcactctaattcggatttgccatagccttgaggttatgtccttttccattaagtacatgtgccaggaaacagcgagagagagaaagtaaacggcagtaatgcttctcctatttctccaaagccttgtgtgaactagcaaagagaagaaaaccaaatatataaccaatagtgaaatgccacaggtttgtccactgtcagggttgtctacctgtaggatcagggtctaagcaccttggtgcttagctagaataccacctaatccttctggcaagcctgtcttcagagaacccactagaagcaactaggaaaaatcacttgccaaaatccaaggcaattcctgatggaaaatgcaaaagcacatatatgttttaatatctttatgggctctgttcaaggcagtgctgagagggaggggttatagcttcaggagggaaccagcttctgataaacacaatctgctaggaacttgggaaaggaatcagagagctgcccttcagcgattatttaaattattgttaaagaatacacaatttggggtattgggatttttctccttttctctgagacattccaccattttaatttttgtaactgcttatttatgtgaaaagggttatttttacttagcttagctatgtcagccaatccgattgccttaggtgaaagaaaccaccgaaatccctcaggtcccttggtcaggagcctctcaagattttttttgtcagaggctccaaatagaaaataagaaaaggttttcttcattcatggctagagctagatttaactcagtttctaggcacctcagaccaatcatcaactaccattctattccatgtttgcacctgtgcattttctgtttgcccccattcactttgtcaggaaaccttggcctctgctaaggtgtatttggtccttgagaagtgggagcaccctacagggacactatcactcatgctggtggcattgtttacagctagaaagctgcactggtgctaatgccccttgggaaatggggctgtgaggaggaggattataacttaggcctagcctcttttaacagcctctgaaatttatcttttcttctatggggcttataaatgtatcttataataaaaaggaaggacaggaggaagacaggcaaatgtacttctcacccagtcttctacacagatggaatctctttggggctaagagaaaggttttattctatattgcttacctgatctcatgttaggcctaagaggctttctccaggaggattagcttggagttctctatactcaggtacctctttcagggttttctaaccctgacacggactgtgcatactttccctcatccatgctgtgctgtgttatttaatttttcctggctaagatcatgtctgaattatgtatgaaaattattctatgtttttataataaaaataatatatcagacatcgaaaaaaaaaa

SEQ ID NO: 342 - DNA, 441 bp, Homo sapiens
  Modified_base 1 ... 441: n = a,c,g, or t
  ref <308>: DATABASE ACCESSION NUMBER: R59187
  ref <309>: DATABASE ENTRY DATE: 2001-06-18
tttttttttgctttattcatcaaagatttattgagtatctatctcaaggcagatacagagtagagaaccagaggaacaaagtctctgccctcatggagcttttattctagcgtctgaagattcagtgtaagagtgcagagcaaagcttgggacctagcaatgcatccaggaagtnttagctattatcatttctcatctcttgttcttgtcttgttttggccccagctcttacattctcatcagatcagatactgacccccagggcaaagattgtatctcttcctccaaagtgcattagctctgaagttggactgaatcccagctctgttcgtgatctgcggtgtcccggggaaacttaacttctctgaatctcaattttcccatacgtgaaataaggacaatacagctaccttaggggagtcaatgtgagggttaaataaa

SEQ ID NO: 343 - DNA, 2334 bp, Homo sapiens
  ref <308>: DATABASE ACCESSION NUMBER: J05070
  ref <309>: DATABASE ENTRY DATE: 2001-06-18
agacacctctgccctcaccatgagcctctggcagcccctggtcctggtgctcctggtgctgggctgctgctttgctgcccccagacagcgccagtccacccttgtgctcttccctggagacctgagaaccaatctcaccgacaggcagctggcagaggaatacctgtaccgctatggttacactcgggtggcagagatgcgtggagagtcgaaatctctggggcctgcgctgctgcttctccagaagcaactgtccctgcccgagaccggtgagctggatagcgccacgctgaaggccatgcgaaccccacggtgcggggtcccagacctgggcagattccaaacctttgagggcgacctcaagtggcaccaccacaacatcacctattggatccaaaactactcggaagacttgccgcgggcggtgattgacgacgcctttgcccgcgccttcgcactgtggagcgcggtgacgccgctcaccttcactcgcgtgtacagccgggacgcagacatcgtcatccagtttggtgtcgcggagcacggagacgggtatcccttcgacgggaaggacgggctcctggcacacgcctttcctcctggccccggcattcagggagacgcccatttcgacgatgacgagttgtggtccctgggcaagggcgtcgtggttccaactcggtttggaaacgcagatggcgcggcctgccacttccccttcatcttcgagggccgctcctactctgcctgcaccaccgacggtcgctccgacggcttgccctggtgcagtaccacggccaactacgacaccgacgaccggtttggcttctgccccagcgagagactctacacccgggacggcaatgctgatgggaaaccctgccagtttccattcatcttccaaggccaatcctactccgcctgcaccacggacggtcgctccgacggctaccgctggtgcgccaccaccgccaactacgaccgggacaagctcttcggcttctgcccgacccgagctgactcgacggtgatggggggcaactcggcgggggagctgtgcgtcttccccttcactttcctgggtaaggagtactcgacctgtaccagcgagggccgcggagatgggcgcctctggtgcgctaccacctcgaactttgacagcgacaagaagtggggcttctgcccggaccaaggatacagtttgttcctcgtggcggcgcatgagttcggccacgcgctgggcttagatcattcctcagtgccggaggcgctcatgtaccctatgtaccgcttcactgaggggccccccttgcataaggacgacgtgaatggcatccggcacctctatggtcctcgccctgaacctgagccacggcctccaaccaccaccacaccgcagcccacggctcccccgacggtctgccccaccggaccccccactgtccacccctcagagcgccccacagctggccccacaggtcccccctcagctggccccacaggtccccccactgctggcccttctacggccactactgtgcctttgagtccggtggacgatgcctgcaacgtgaacatcttcgacgccatcgcggagattgggaaccagctgtatttgttcaaggatgggaagtactggcgattctctgagggcagggggagccggccgcagggccccttccttatcgccgacaagtggcccgcgctgccccgcaagctggactcggtctttgaggagccgctctccaagaagcttttcttcttctctgggcgccaggtgtgggtgtacacaggcgcgtcggtgctgggcccgaggcgtctggacaagctgggcctgggagccgacgtggcccaggtgaccggggccctccggagtggcagggggaagatgctgctgttcagcgggcggcgcctctggaggttcgacgtgaaggcgcagatggtggatccccggagcgccagcgaggtggaccggatgttccccggggtgcctttggacacgcacgacgtcttccagtaccgagagaaagcctatttctgccaggaccgcttctactggcgcgtgagttcccggagtgagttgaaccaggtggaccaagtgggctacgtgacctatgacatcctgcagtgccctgaggactagggctcccgtcctgctttgcagtgccatgtaaatccccactgggaccaaccctggggaaggagccagtttgccggatacaaactggtattctgttctggaggaaagggaggagtggaggtgggctgggccctctcttctcacctttgttttttgttggagtgtttctaataaacttggattctctaaccttt

SEQ ID NO: 344 - DNA, 724 bp, Homo sapiens
  ref <308>: DATABASE ACCESSION NUMBER: AI354439
  ref <309>: DATABASE ENTRY DATE: 2001-06-18
ttttttttcaagtttcttcagagtttttaattattattattattttaataacaacctgaatcccagaacttccagatactgtccacactccctcccctgggcagaggagaggaggcacctcaagggaacaagatgggggtggggtgtctgccggggagcctccgactcccccaagccgtctactgctggggggtcccaggagggagggtgggggttgctcccccctcctcctcttccccccctcctctccctctttctcctccttctctcctctcccgcctcttcttctctcctcccgtcccccccccttcctgtactcctcctccggcccgcgctaccccgcctctccctcctgccgtctcccgccgactggcgcctctcccgctctccgacactccctctcgtccctcactcctctcctcctcctccccgctcccatcctctcctctctaccgtcttctttccacaacgtgctctgctccgctccacctctcccctctcccccctctctcccgttccgcctccccctcccttctcccctgctcgtgacacccgctcacgctccacctccgaccctcgcttcctttcacgagctgctatattatccgcactaccgctctaccccgcccctcgcacctgatctacccgtgcctctccccgcctccgctcttctctcctgctcccgccgtcgcctcctcctctcgccgcttcctgtatgtcctcc

SEQ ID NO: 345 - DNA, 6253 bp, Homo sapiens
  ref <308>: DATABASE ACCESSION NUMBER: D86960
  ref <309>: DATABASE ENTRY DATE: 2001-06-18
ctccccgccagtccgggcgaacgcggccgggcccttggggaccgagtctcggcgccgccggggaacgggcgcgggccgcgccacagccggagcggggcagggccccgccaccgccttcttccgccggccccgccgccggccatgcattcttccggctcctctgactcccaaagccccggctggggcccggccagcccgagaaagacaggacggagtccagtgtgagaatggctataactttggaagaagctccgtggctgggctggctcttggtgaaagcactgatgaggtttgccttcatggtcgtcaacaacctggttgctattccatcctacatctgctatgtaattatacttcagccccttcgagtgctggacagtaagcggttctggtatatcgaaggaatcatgtataaatggcttttaggaatggtagcttcctggggatggtatgctggatatacagtgatggaatggggagaagatattaaagcagtttcaaaagatgaagcagtgatgttggtgaatcatcaggcaacaggagatgtgtgcacactgatgatgtgcctccaggacaaaggactggttgttgctcagatgatgtggttgatggatcatatttttaagtacacaaactttggaattgtttctctagttcatggagacttctttataagacagggaagatcttatcgtgaccaacagctgctgcttctcaagaagcacttagaaaataattacaggagcagagatcgaaaatggattgttttgtttccagaagggggcttcctcaggaagaggcgagaaacaagtcaggcatttgccaagaaaaataacttgccatttcttacaaatgttactctgccaaggtctggggcaacaaaaattattttgaatgcacttgtagcacaacagaaaaatggaagtccagcaggaggagatgctaaagaattagacagcaaatcaaaaggcctccagtggataatagatacaacgatagcttatcccaaagctgaacctatagatattcaaacctggatccttggatacaggaaaccaacagtcacacatgtacattacaggatctttccaattaaagatgtacccctggagactgatgaccttaccacttggctctatcagcggtttgttgaaaaagaagacctcttatcacatttttatgaaacaggagcttttccaccttccaagggccataaggaagctgtttccagggagatgaccctcagcaacttgtggatatttctcatacagtcttttgcatttttgtcaggctatatgtggtacaacatcattcagtatttttaccattgcctgttttaggaattgacgtggacttgtcaaggtcaccgtaggagttcagactttctttcataagtgtgcattattttacatgtgcaaatcagaatatatttaaaaaaaagcaaaagaaattcaatggatggattaatatttatccccctttgggatattttaaaatctactaaaatgaggattagtaatataatgacctgctaatatattttaagaacatgttttaaaaagatacactctatcacatatttaagcaaacatcacatttggagaagaggaaatcataaaatcatcctagaagactatctgagagaaattctgttgccaccagttatacttgacaatttagttgaagctcagaaagttatattcatccctcttagctgtagtctatattagggcagttctctagaacgcccacatttccaccaactcagtaaacttgaggggagctggttggcacctcgtgaagaactctttccctgtcgtttgcagtaacaaactccagtctgttgcagtaacaaactccagtctgttgcagtaacaaactctagaatattgacattctctgtgggggaaaagcagtgtccactggaccccttctggtactggatgtgttctttacaaaggctagctcagtccaacattgtgtttacatacactcgtgcttttccttatctgacttctcattttgtatcagaggcatatcataaattgataattttgcaaaatgcacttttttgagatgcagatatagcaaaggattagtaatatagcctgaaaacaaatgggagcatagcagtgtgtgaggttctcgagaactgtcttgtctctgtgtgtttatttgcctgccagtgctctccagcgccatcctgccctggacaccaccctgacgtgatgcctctattgcagctcagaggctttattttttccattttgacattggcactaaatgcatttggggatggttaaaacaaattactatagaacatttaaatgatcagtttaaggggaaataggctagtttatagaaaaataagagctagtggcttataatggtgacaggttctcatgtggcacccctaggacctgtgcagacagtagtctgttgaatcattacatcaaggagctgcccctgtcagggtgagtgtaattaggaacgataccagcacataaggctccccccaatctcttccagttgctttttcttttttctttttttttttagacaggtcttactctgtcacccaggctgtagtgcagtggcataatctcagctcactgcagtctctgcctcccgggttcgagcgattctcctgcctcagcctcccgagtagctgggactacaggcacccaccatcatgcttggctaatttttgtatttttagtagagatggggtttcaccatgttggccaggctggcctcgaactcctgacctcaggtgatctgcccacctcggcttcctaaagtgctgggattgcaggcgtgagccaccacgcccggcctccagttgcttttgaagagggtaaagtcaagtttctatttctagaaaacattttttagaaatttgttgcgatgtttgtacaatttacctcataagagaaccacacccttctccaaaagtgctggtactgcatcagtgagatgagtagggtttttgtttgggattgtaagactattaagatcctagtaagtcagtggtagtttactgtgatgtgagcattgtagattcccccgttgtcactaatcacacaacaattttgagaagtaggctataaaacaaaaaaaggttgctgttttctatttttaaataaaccaaaaaaaaacagaaaagatgtgaattttccccagttatgtgggaaaggtaaagcaacaccaaataaaagcccacagcagcttcatctttacgataactcagtgcatatgtgaaagagaatgatgcattaactgaaatacctcattgaatattatactactactggtaaaatgcagaagacagtgttaatgtgtttggtttgggtactggttgttataaaatgcaatttttttttaaatctaagcatttcattatgtgttctacagtgtcggtgaataaatgaaaccaatctcaatttagaggtatggatgatgacagaaagcccaatagaagcttaatgatgcttctgtttgaggcccagcaagcaccactaaattactggatgaaatgaaattgttcacttgagggattagtcaaccatctgggggagaagttgctcactgtcaaatacagcatgcacggtcctagctgatagaccttttcctcattgctacagcaagccacagggtagagtgaccagttctcctatccaaaaataaatgcgaacatgcatacataaatgtggctgagggccacttttgccatcactgtgctccaaaggaacatgatattgttaaatatactgtacacattaaactattctataagatgctttacttttcaagtacggtgtcattttcacagtctccagggtgacaaatgccaatagatatgtgagttaatttttttaaatatctccgtgagttgtaaatagatgtgtatttgatctgccctatccttctttgattctttaacatgttctctctcttttgtttgcaaaatatgtttgaaagcattggtagtgctttccttatcagtaactggagttctcctgcttgcactagagaaggtaaagagagaatcagtattcttatatggcaatctggggaagcagcaatatgccactgtacaaaactgaagaaaagttcctaatttgtactttgtgaagggagatgaaaggacgtttaaagtatatatattttgtcaagaggaaagaagataaaactatgccagttttatatcaatagcttgtagaagctcagctcttcttggtcttggctagactgcctagattcccacagcagacaaggttgagaatccattgctggaatcttggtattgatgagttacagtgatggaacatgtgcttggccacaggcaggtccagtcactgcaaaagtgaccaagccagcaggtcacccttaacttcagaaacaattattggtggtgaactgtacttaaattgcagagaaacctgtaagtaatggaaggtaaagaaaaattacagaatggaaaataatattttgggcaagcaaacaaattcactgagaattccaaaagtatattaaaaaagaagatagctatgagttcagatctatcttattggtctttaatattacaaccaatccttaactttccactataaaggaaggattactagattgattactttctgggtagataatctggtaataaatgataggtaaatcaaaaattacttttatttaggagtttgaattcttactctcatcagacattttttttctagggacgcttactaattaaatgatttaagttgtttcttaggggttttttgcctatatatttatgactgtgttaatgagtagtgaaatgatgcggaaagacagctatcaggaagaggaaatacagaagcctgaataatctatgggttagaaaagcatccctgaataatcaaaaattggcagtattggcattgttctcaagcctttttatgaaaatgaaatctgaaatcaccaaatgtaaacctgggaacattattctagtgttgctgtcttggattcatgttaagaagcgtcttcattctttgctcatgttgcccacttcttgtggatttgtctgagtgttttttgacaatcacttccttaaagactcttctgaactagttggacctggttaatcatagagagtagcctttaatcatggatagtcttcttggattatttttatatttgaaaagaaaatgttttatttgcactactgagtaggaagagttaattgttttctttgttctttttttgaagtcattacacaggacttcactccagagttaccattatgagtgtgttcagctctggtccacagaggatggataaaaatggtttgttatgtttttttgctctgcagtgctatgagccttatatctgttaatatgaaggacaaagtcaaaagcagcagtggatagcaggaagggtagagactaatatgtttgggaccaaaaccatctaagttagagatttccagatcacagaggggctgggcattctctggagcagtcattggttggtgctttattgtaatcattttgcgccaatccccaacaattaggaactggaccctgggaataagctgagggtgctgaactgttggggaagggtgactgtagccacatggaagataaaatatgggtttttctgcaaaatttccatctgagggtttttacatttaatatttttttaagacagtttaaagagcaaacgttttttaagtgtattctagttgcaaagtatgcacacatatcttgaatggctttatttttattgtgtaaaactgttgaacacatgactgtgatgcacaaattctttacgtgtaaggagtctatgcattttacagtaacttattttatgatcgggtgatgagacagttatactttcaactgccattatttttattaagtgctttcattttctttacagttattataaaattgtatttattttatacagatgggttttcattttcctgatgctgtaatgtttacttcagcttgttgacctttctttgtgttatctgcatgttgtaacgtgtgataagaatgaatgtaaaggctgtggcaactgtaattaatttttgtaaagggctggtcacacgtggatctggtttatgaatgcatttgggatgattttggtaaccagatcaccttttcagaaatttagatgtgaacaccaaaagaagcattttctcaacaaaaattaatagctggttctattttttttaaacctagaaaaaataaagttgatttttttc

SEQ ID NO: 346 - DNA, 4674 bp, Homo sapiens
  ref <308>: DATABASE ACCESSION NUMBER: AF034373
  ref <309>: DATABASE ENTRY DATE: 2001-06-18
cgggacgctcctcacttcctagatgggatggcggccgggaagaggcgctcctcatttcctagatgggatggcggccgggcagagatgctcctcactttcctccagccgcgagaccccctccccttccgcctcgcggcgcttcctcgcgccgcggttttctctctccacccccgacaccgcggggctccccccgcccgcccacggcgggccccggctgcccgatccccctcgcttcccgcgctctccagcggggccccagccccggccccctctctccctcccttctctctaattccccttccggacgctgccatcatgttgaagcctcagccgctacaacagccctcccagccccagcagccgccccccacgcaacatgccgtggcccgtcggccccccgggggcacagccctcccaacggcggcctcccggggccgctggccacctctgcggctcctcccgggcctccagcggccgcctccccctgcctggggcctgtggccgctgccgggagcgggctccgccggggagccgaaggcatcttggcgccgcagccgccgccgccgcagcaacaccaggagaggccgggggcagccgccatcggcagcgccaggggacagagcacaggaaagggacccccacagtcacctgtgtttgaaggcgtctacaacaattccagaatgctgcatttccttacagctgttgtgggctccacttgtgatgtaaaggtgaaaaatggtaccacttatgagggtatcttcaagacgctaagctcaaagtttgaactagccgtggatgctgtgcaccggaaagcatctgagccagcaggtggccctcgtcgggaggacattgtggacaccatggtgtttaagccaagtgatgtcatgcttgttcacttccgaaatgttgacttcaactatgctactaaagacaagttcaccgattcagccattgccatgaactcgaaagtgaatggggaacacaaagagaaggtgcttcagcgctgggaggggggtgacagcaacagcgacgactatgacctcgagtctgacatgtccaatggatgggaccccaatgaaatgttcaagttcaatgaggagaactacggtgtgaagactacctatgatagcagtctttcttcttatacggtgcccttagaaaaggacaactcagaagagtttcgtcagcgagagctgcgtgcggcccagttggctcgagagattgaatcaagcccccagtaccgcctacggatcgccatggagaacgacgatgggcgcactgaagaggagaagcacagtgcagtccagcggcagggctcagggcgggagagccccagcttggcatccagggaggggaagtatatccctctgcctcaacgagtccgggaaggtccccggggaggagttcgatgcagcagctctcggggcggtcggcctggccttagctctttgccacctcgtggccctcaccatctggacaacagcagccctggcccaggttctgaggcccgtggtatcaatggaggcccttcccgcatgtccccaaaggcacagcggcctctgagaggtgccaagactctgtcttcgcccagtaataggcttctggagaacttctgttccacctcctcctgcagtgggccggatgtatccccgcgttctcccaagtctgctgcccctgccccaatctcagcttcctgtccagagcctcccatcggctcggcagtgccaacctcttcagcctccatccctgtgacctcatcagtctcagatcctggagtgggctccatttctccagcttctccaaagatctccctggcccccacagatgtaaaagaactctctaccaaggaacctgggagaactctggagccccaggagctggctcggatagctgggaaagtccctggtcttcagaatgaacagaaacgattccaactggaagaactgagaaagtttggggcccagtttaagcttcagcccagtagctcccctgagaacagcctggatccttttcctccccggatcttaaaggaggagcccaaaggaaaggagaaagaggttgatggtctgttgacttcagagcccatggggtctcccgtctcctccaagacagagtccgtatcggataaggaggacaaaccacccctggcaccatcaggaggcactgaggggccagagcagcccccaccaccttgtccaagccaaactggcagccccccggtgggcctcatcaagggagaagacaaagatgagggccctgttgctgaacaagtaaagaaatcaacgttgaaccctaatgctaaggagttcaatcctacaaagcctctgctgtctgtgaataaatccaccagtaccccaacttctccggggccccggactcattcaactccctccatcccggtgctgacagcaggccagagtgggctatacagcccccagtacatctcctacatacctcagatccacatgggaccagctgtgcaggcacctcagatgtatccatatcctgtatccaattcagtgcctgggcagcagggcaagtaccggggagcaaaaggctcccttcctccgcagcgctcggaccaacaccagccagcctcagccccgccgatgatgcaggccgccgcggctgctggcccgcctctggtggctgccacgccctattcttcctacatcccctacaaccctcagcagttcccaggccagccagccatgatgcagcccatggcccactacccctcacagccggtgtttgcccccatgcttcagagcaacccacgcatgctgacgtcgggcagccatccccaggccatcgtgtcatcctctacccctcaatacccttctgcagagcagcctaccccccaagccctttatgccactgttcaccagtcctacccacaccatgccacacagctccatgcccaccagccgcagccggctaccacgcctactggaagccagccgcagtcccagcatgcggcccccagtcctgtccaggtgcctgccatggggggtgctgagtggtcctggtgcaggaatgggtggccagaagaagggatagagctaggggtcatttctgagtggcgaggactgggggccagcgagttgctggcctgtgtggcactcaaccttcccctccccagcagcatcaggcggggcaggccccacacttgggcagtggacagccacagcagaatctgtaccacccaggggccctgacaggcacgccgccctctctgccaccgggaccttctgcccagtcccctcagagcagcttcccccagccagccgctgtgtatgccatccaccaccagcagctgccccacggcttcaccaacatggcccatgttacccaggcccatgtccaaactggaatcacagcagccccgccccctcaccctggggctccccacccgccccaggtgatgctgctgcacccaccccagagtcatggggggcccccccaaggcgcggtgccccagagtggggtgcctgcactctcagcttccacaccctcaccctacccatacatcggacacccccaaggtgagcagcctggccaggcgcctggatttccaggaggagccgatgacaggattcgtgagttctcattagctgggggaatttggcatggaagagctgaggggatgcaggtggggcagggatgacacgggttctgggtggggagtgaggggtcttggaggcagggctgtcccacagggcgcccgctgacctgcacctgtctgtgaagtatgtagggtgggcagaagccacagtcgccgccgccaggggcttgctcctggctctgtcctttgcttccctccgtcctcgctcagttgtgatccagcagcccccctccccactgcctccccagtctcagtgaccccgatgtctctgacttagcggaggtaaggtcagtgcagcagacagggccagactggggtgtggggggctgagctgggcacatgagtgagggttctggcttactgggaaacagcgattgacctgtgcttctgacagcccccgagacacttgaggagccgctctttcccagacacacccccacgcccccactggacggcattggaggaaggacagctgcttgggttctaatgctcctgctctcttctctttcccctccaaccagttcaatctcatccctcccagcagctccctttccaccccccggggaactgaagattgtcctggccgcgacctgagacctccatgagtggagggaagagtgatctatgtctcttcccccagcagctcggaccactcccagccccccatccccccgttccccaggggagctggggaattcctgccaagcaccttgaatgggaggggcctcacagagggcagggccagggtccagcaggggtggggggttcctgttctgcccctgcccgtccccacccagtcttgccctcccatcctctcatctattcccccgctggagacggaagatcttttattttctattatttataacttcagacttgggccccctgttctttctttcccattaacttgagtgacctgtgtgagagacagacagatgccccacgaggatggctggacaaggacttttactttttattacataaaaatattaaaaaataaataaaaaaaataaaattttaaactaacttaaaaaaaaaaaaaaaaaaaa

SEQ ID NO: 347 - DNA, 6547 bp, Homo sapiens
  ref <308>: DATABASE ACCESSION NUMBER: AB007918
  ref <309>: DATABASE ENTRY DATE: 2001-06-18
gggaccatcctgcgcccactgtcaatggcacccgtcctgcccgaaagaagttccagaagaagggggccagccagagcttcagtaaggcggcaaggctcaagtggcagtccctggagcgacggatcattgacatcgtcatgcagagaatgaccattgtcaacctggaggctgacatggagcggctcatcaagaaaagggaggagctgttcctcctgcaggaggcactgcggaggaagcgggagcggctgcaggctgagagccccgaggaagagaaggggctgcaggagctggctgaggagatcgaggtgctggcagccaacattgactacatcaatgacggcatcaccgactgccaggccaccatcgtgcagctggaggagaccaaggaggagctggactccacagacacatccgtggtcatcagctcctgctccctggctgaagcccgcctcctgctagacaacttcctcaaggcatccattgacaaggggctgcaagtggcacaaaaggaagcccagatccggctgttggagggccgactgaggcagacggatatggcaggctcctcccagaaccatctgctcctggacgccctgcgtgagaaggctgaagctcaccccgagctgcaggccctcatctacaatgtgcagcaggagaatggctacgccagcacagatgaggagatctcagagttctctgagggcagcttctcccagtcattcaccatgaaaggctccaccagccatgacgatttcaagttcaagagcgagcccaaactgtctgcccaaatgaaagctgtgtcggctgagtgcctgggccccccactggatatctccaccaagaacatcaccaagtccctggcctccctcgttgagatcaaagaggacggagtgggcttctctgtccgagacccctattaccgggacagggtctcgcgcaccgtcagtctgcctacccggggcagcactttccctaggcaatctcgagccacagagacgtccccgctgacgagaaggaagtcctacgaccgagggcagcccattaggtccacagatgtgggattcacacccccatcatcccctcccactcggccccgcaatgaccgcaatgtcttctctcgtctcaccagtaatcagagccaggggtcagcgctggacaagtctgatgacagcgactcctctttgtcggaggtcctgaggggcatcatctccccggttggaggagccaagggtgcacggacggccccactgcagtgtgtctccatggccgaaggccacaccaagcccatcctctgcctggatgccacagatgagttgctattcacagggtccaaagaccgaagctgcaagatgtggaacttggttacgggacaggagatcgcagctctaaagggccaccccaacaacgtggtctccatcaagtactgcagccactcggggcttgtgttctccgtgtccacctcctacatcaaggtgtgggacatccgggactcagccaagtgcattcggactctcacgtcctcgggccaggtgatctcaggggatgcctgtgccgccacatccacccgtgccatcaccagtgctcagggcgagcatcagatcaaccagatcgccctcagcccttcgggcaccatgctgtacgccgcctcgggcaatgccgtccgcatctgggagcttagcaggttccagcctgtcggcaagctgactggccacatcggccctgtgatgtgcctgacggtcacccagacggccagccagcatgacctcgtggtgactggctccaaggaccactacgttaagatgttcgagctgggcgagtgtgtgacgggcaccatcggccccactcacaacttcgagcccccgcactacgatggcatcgagtgtctcgccatccagggagacatcctgttcagtggctcccgagataacggcatcaagaagtgggacctagaccagcaggagctcatccagcaaatccccaatgcgcacaaggactgggtgtgcgccctggccttcatcccgggccgccccatgctgctcagcgcctgccgtgcgggtgtcatcaaggtctggaacgtggacaacttcacacccatcggtgagatcaagggccacgacagtcccatcaatgccatctgcaccaatgccaagcatatcttcacagcctccagtgactgccgggtaaagttgtggaattacgtccctggactcaccccctgccttcctcgccgagtcctggccataaagggccgcgccaccaccctgccctgaccctccccaactctccctgtctcctctttcattcttcccctctttccttttccctctctttccccacttcgatctgagctgcttcttaacgtgacctgacggtgaagttctggagtgtccggcggttaccccacagcggcccaccctaggagtgaggtcagagggatgcccccggaccctcgaccccagcagcctggacaccatggaagggaagctgtgacccggccgatggggccagctgctctggggacagagggcgtggccccctctcctgccctcctccctctcccttggccttcccacaggacactgttccctcatccctcccctgcctctcaggagcctctgggtgagagagaggctggggaggaaattaagctgtgaagccaaagggcattatcccttcttgttctcctcctggcagtcgtggccacattgtctcctgctgaaccggctctgcccctttctcaggcctttggcccagtggtggagccctgtggggaggtgcagcagcctggccccatcccacccttccgaggagctggcctccccgcttctcccagcccagcctctagagccactgcacctgcctctgagcccaaaaagataagtcctcaggtagctaaggaaaccaggtgtgggcggctgggccttgcagctaacccttaaccctctggcaacccgcagatagccccaactggccccaacagttccctggggtcccttttggatggggccaaggtggagctgctagaaagattcctttggggagatggtcagaaatacttcagttatttattattttgttatttttattttttgctgttgcctcctggaaacggacttgaagtttcttcccctatattctttccctcagctcttgggggccagaaatcccaaagggagtccgctgccccggccctccagggccgcctcctctgtttgctttgcagaggagggaactgctccttcgactctgcagctcaggcctgtccccgacacagcccccagggagtcttctagctacccctggcctctaggccgcctgacgctcagtgccttcctccgttccggggcctggcacccgtgccgggcagccttacaccagccatgcccgcggcaccacatgtgtcttctcactcgcgaggtcttgtgcccagcgcccccgggaaggcggggcgctcaccccacagcccaggccccggggttctgccccacagtcctgcgtgggccacgtaggaagcagcgtgggggctgtgtctgctgggaggtggcttggatggggaggacagcccggcaccctgacccccgcccctccccagccctgcagtcccccactgggccggggagtctctccagcttctctctctctggttattcaggagacacattttcggccttaaaactggcatggagcgcaggccctcccttgcagaaaattatcaaggaagagggagttggcagagtttctctgccccggggctggggacgcggagctccggggaaattgttaaatcagtgttctggcgccccctgttgggggaactctggaattacaggagtgggccttgggggggactgagctccatccctctcccccgccccacccccacccaaagttgcccaccctgtttttccgttgcatcgctggtcttgtgcttcccgcttcagtctgggagccaagagccagccccacctcccttcagaggacgcagtgacttttggactttccagaggtggttctgtgtttctgcccttggctcctctccgtcttgggctggggcacttggagccctctccatgtggcgcccagtgttggggggaggcaggctccagtggaggctgagtgaggcctggtcccttccccgtgccctcctcggagctgccacagaggctaagacggctgtcctgctggtgctggccctgctggatgtggtattgaagtctggggcagctgatagcaggaaggagacccccttggatgctggtctcctgggacctgaacagtctgtcagcaatggctggaaatccttcttcctctggccaccccgggggtgccgggcaacccccttagctctaagatgtggccacaaatctcttcccactcctccccgccaacctgaacagaaagttttgaccttgcaacctgtaagaaagaatccgtccgcatgactgtttacaagcgatagaaacacgtaagactctgtccccttgagctcccacccccgggccggggatgccccacctggggtgactgcactgtagctgcaaggcgtgttcttgcacgaagtgtgatcttatggccctgcgagaggtgctcatcatcatgcccattttctgctgtttctgatgggtcagctacctcacggcggggccagctctgctgtcctggcaagtgtcattgactctctaaacttgaagtccttcaggagccctgagcccaacatccatgagacaccccgagttgtgcttcatgagagttggattctctgcccactctttcagggatgtccaaggtccatgttagggggcaggcccccagctccactcactgcacaagcaccctaaatgttggaagcacaaaatggttgtgatttgagcacaatggcagggtcccgcaggcagacttgacaggcccaggcccgggaggatccccccacgttggctctgtccaaagtgagattgggggtgcctgtgtctgggacagggggctgcccttgctcagaccaggccttggctcatggcttgtcctaattctgggactcgtcatcttacttcttgcccttctgtgcccatcttaagactggaggctgagccttgtcaggcccagccacatctttacgccatgggaccaggagtaaagcgctctctaaaccccgcaccccaaatctctaaacgcctgagttcaggctgagtcctagccctagtgagcctgaagagcttggactgattcccagtctcctgggtcaagccccactttgtgctttcgaagcttatgagcgggttccctggatagaaggagtcttccatccccactgcccttgggcctcttcagcatagtcctgtgccagggccctgtcctcactatcagtcagttcagtatttgctttcacgtgagtggcggactcttctgaagcagccagaactctcaaagacagcgcatggagttgccttgcgagatttccaaggaaggaggaaagattaacaggcggagcctggcacacccaagcctttgaggtggtcagagtgccaccttcagccccttgggaagggacagcggtgggtctgggagtggcctcaccctggattcagcctaggaatctcttcaccctcagctgtccagccctgctgcctgtctggggatgtgtggcctgggcagagggcagtttaaagcacaaaaccacatggggaaaacacaaggttgcggggactttctcatgtgcctgatgtggtggagggagacaccagcaggtggctgcagtgacgttagggaacataacacttctttgccctgctagctctcagctctggggggcatcccccgatgtggtctgggctgggagcaggcatatcccctggttgttgcctgtgcctggtctgttcaccatcgtgtttgtgtgggcagagcctgccctgcaggagcagtgactttcttcccactgtgtgtcccggacctgtggtatgtgtccctttgccatcccaaacaggcaactgcttgctgctctccttgcttggcatagcctcctggtcagtggccaatgccccacaggccttcctgggcctggccctcctctcctgactcccagatccttccctgccctcttgtgtgcaaggacagattttgcagggaaagttctgtttcttctttgatacctttgttctgtcccctgccccatccccagcactcatgatcttgaagcccctatcacactctagttcagtcctgtgaaccatgtcctgagggccttgcagggaagtaggaaatagaaactcctccacaaagagccgaggatcagagaagacccctgagatgaatcagggccctgccctgcccaccaactcttttctagcaatcatgtcctgcccaggctgcaggcttcattaggctcctgctgtcctccatgatgtgactagcacaaggtgtatatatgttttgtacctctgccgatggctgtacatagtgtatgaaagttatttaagccccatgttgtacatttctgttcctagattggatgtgtgtgttctaagaagttgtcataaataaaacctgaatgacc

SEQ ID NO: 348 - DNA, 461 bp, Homo sapiens
  ref <308>: DATABASE ACCESSION NUMBER: AI381472
  ref <309>: DATABASE ENTRY DATE: 2001-06-18
ttttctgggcctctgattcatctttattccctccatcatctagacttgattttatttgtaccaaggagatgcgtgtctaatgtttttctttcttctatttataggagggctgttggcctgctgctgtgctgctgaacagtatgcagtcctttcgggagcaaagcagttaccacggaaaccagcaagctacccacaggaggtacacggctcatcccggctagaagagttcagccctcgtcaggcccagatgttccagaattttggaggtacaggtggcagtagtggcagcagtggcagtggcagtggtggtggacgacgaggagcagcagctgctgcggcagcgatggctagcgagacctctggccatcaaggttaccagggtttcaggaaagaagctggagaattttaacatggcaggcaacaaagaccccgtgacttcaggaccccacagccttcttagc

SEQ ID NO: 349 - DNA, 540 bp, Homo sapiens
  Modified_base 1 ... 540: n = a,c,g, or t
  ref <308>: DATABASE ACCESSION NUMBER: T66135
  ref <309>: DATABASE ENTRY DATE: 2001-06-18
ggttattnaatgatactaaganatggtgctgtaaaactggatttcattgatgagatttaagacgtatganagagaaagtctctttagacagggacatgaaaggtagccatcaataaaagttactaaaagtaaactcagaaaganagangtgataaaccatccaatcccctaatgaaccttagctcctggcagagagacagctcacaccttctggggtgcaggtncccatccctgtnctcagaaaaaagcgttaagtaaggcaaaangtgattcctcctattttanntgagttggggtacagaggggagctgcctgtagtcttganttctttttttccagtattaaagcctttntgcgggtttgaggataggacatgcagttggggctggggccatgcttgctgtggaatgtcagggtgttgaggnttaggcaccacaccattccccggggtntgaggttttgncatggcggtctttgttcccatcattgtctaggaatgtgaggatagggtaggcttgggggnacggccattttgggggg

SEQ ID NO: 350 - DNA, 398 bp, Homo sapiens
  ref <308>: DATABASE ACCESSION NUMBER: AI079292
  ref <309>: DATABASE ENTRY DATE: 2001-06-18
agattgcaagtagtttatttggaggtgaattcagaaaacacttgtagggtttagagaagtaagacagaagagggaaggaagccaatacaaggggatttcaaaaagttcatggaatcacaaccagttacagatttctttgctccttttccactcccactgcttcacttgactagcctctgctcacgcgtgttcttctggtgagtgtccccgcccgaaacaggtcaccctgcagccgctggcgtcgcggacgcactctcccggggccgcgcccgatgctgcccaagccctctgcggctgggggcgaggggagcgctttcctacgccacgcggtccacgccggggctttctgctgcgggtggcgccgcccccacgccggccgcgtggtccctgcctgcgcc

SEQ ID NO: 351 - DNA, 483 bp, Homo sapiens
  ref <308>: DATABASE ACCESSION NUMBER: AI091230
  ref <309>: DATABASE ENTRY DATE: 2001-06-18
aaatccatacaaacatttattctgtccctgcctggaggtgagggggaagggggtccggagagccccgcagaggaggacggggctctagcgggaagacagtgtccggaggccggtgggctccctctagacggcagaccctggggctaacgaggggccagctgggttctcagaggtcacggagtgcaggggtggggcggcgagtggtggaagccggcgcccccgaagaccggccagcccctggagcacagaggcgggtccagcccacactgcgctgagtgtggccctggcccccactggggtctgtcccacccccaccccgcaggagggaaggcagcaggcccgctcttcccggtgggaaagatgctgtgcaagtcatcaggtttaaattaaaaataataaaaataacaatacaaaataaaaaaagactgtctcaaacaaacctgggacaagcccgccccgcgacccacgtgaggagcagaggtg

SEQ ID NO: 352 - DNA, 6401 bp, Homo sapiens
  ref <308>: DATABASE ACCESSION NUMBER: Y07759
  ref <309>: DATABASE ENTRY DATE: 2001-06-18
aatacaccccgggcaggtggagcgctcgcggctgctcgcggcgagcccgggagtgatggcgaggcccctgcgggcggccagcgcctgaggcgccccgccccgccccgccccgcgcggccctccccgcccggccctgccctgccctgctccctgccggcggctgcgggcgcttcctagtccgctcgggcggccgcccaggcgaggtgcggcctccgcacaggccggggggcgtaggcgcgcggggcccgccatggctgcgtcggagctctacacaaagtttgccagggtttggatacctgatccagaggaagtctggaagtcagcagagctgctcaaagattataagccaggagataaagtcctcctgcttcacctcgaggaaggaaaggatttggaataccatctagatccaaagaccaaggagctgcctcacttacgaaatcctgacatacttgttggtgaaaatgacctcacagccctcagctatcttcatgagcctgctgtgctccataatctcagagtccgctttattgattccaaacttatttatacgtattgtggtatagtcctagtagctataaatccctatgaacagctgcctatttatggagaagatattattaatgcatacagtggtcagaacatgggtgatatggatccacatatctttgcagtagctgaagaagcttacaagcaaatggccagagatgaacgaaatcagtccatcatcgtaagtggagagtctggggcaggaaaaacagtctcagctaagtatgccatgcgatactttgcaactgtgagtggttctgccagtgaggccaatgtggaggaaaaggtcttgacctccaaccccatcatggagtccattggaaatgctaaaacaaccaggaatgataatagcagccgttttgggaagtatattgagattggttttgataagagatatcgaatcattggtgccaatatgagaacttatcttttagagaaatccagagtggtattccaggcagaagaggagagaaactatcatatcttctatcagctttgtgcctcagcaaagttacctgaatttaaaatgctacgattaggaaatgcagataactttaattacacaaaacaaggaggcagtcctgtgattgaaggagtggatgatgcaaaggagatggcacatactaggcaggcctgcactttgctaggaattagtgaatctcatcaaatgggaattttccgaatacttgctggcatccttcacttaggcaatgttggatttacatcccgagatgcagacagctgcacaatacctcccaagcatgaacctctctgcatcttctgtgacctcatgggtgtggactatgaggagatgtgtcactggctctgccatcggaaactggctactgccacagagacatacatcaagcccatctccaagctgcaggccacgaatgcccgcgatgctttggccaaacacatctatgccaagctctttaactggattgtagataatgtcaatcaggctctccattctgctgtcaaacagcactcttttattggtgtgctagacatttacggatttgaaacatttgagataaatagttttgaacagttttgcataaattatgcaaatgaaaaactacagcaacaattcaatatgcatgtcttcaaattggagcaagaagaatatatgaaggaacaaattccatggacactcatagatttttatgataatcagccttgtattaatcttatagaatcaaaactaggcattctagatttactggatgaggaatgcaagatgcctaaaggcacagatgacacctgggcccaaaaattgtacaacacacatttgaacaaatgtgcactctttgaaaagcctcgtctatcaaacaaagctttcatcatccaacattttgctgacaaagtggaataccagtgtgaaggatttctcgaaaagaataaagacaccgtttttgaagaacaaattaaagttcttaaatcaagcaagtttaagatgctaccagaactatttcaagatgatgagaaggccatcagtccaacttcagccacctcctcagggcgcacacccctcacacgaactcctgcaaagcccaccaaaggcagaccaggccaaatggccaaagagcacaagaaaacagtggggcatcagttcagaaactccctgcacctgcttatggagacactcaatgccactacccctcactatgtgcgctgtatcaagcctaatgacttcaagctcccattcacgtttgatgagaagagggcagtgcagcagctgagagcatgtggtgtcctggaaaccatccgaatcagtgcggccggtttcccctcacggtggacttaccaagaatttttcagccgctaccgtgtcctaatgaagcagaaagatgtgctgagtgacagaaagcaaacatgcaagaatgtgttagagaaactgatactggacaaggacaaataccagtttggtaagacaaagatctttttccgtgccggtcaagtggcctatctagaaaaattgagagctgacaaactgagagctgcctgcatccggatccagaagaccatccgagggtggctgctgagaaagaagtacctacgcatgcggaaggcagccatcaccatgcagagatacgtgcggggctaccaggcccgatgctatgctaagtttctgcgcagaaccaaggcagcaaccatcattcaaaagtactggcgcatgtatgtggtccgcaggaggtacaagattagacgagctgccactattgttcttcagtcttacttgcgaggcttcttggccagaaataggtatcgcaagatactccgtgggcacaaagcagtcatcattcagaagcgagtccggggctggctggcccgcacacactacaagaggagcatgcatgccatcatctaccttcagtgctgcttcaggcggatgatggccaagcgtgagctaaagaagctcaaaatcgaggctcgctcagtggagcgctataagaagctgcgcatcggcatggagaacaagatcatgcagctgcagcgcaaagttgatgagcagaacaaagactacaaatgccttgtggagaaactaaccaatctggaaggaatatacaactctgagactgagaaactacgaagtgacttagaacgtcttcaactaagtgaagaggaagcgaaagttgccactgggcgggtccttagtctgcaggaggaaattgccaagctccggaaagacctggagcaaactcgttcagagaaaaaatgcattgaggaacatgcagatcgatacaaacaagaaacagagcagctggtatcaaatctgaaggaagaaaatactttgctgaagcaagaaaaagaagccctcaatcaccgcatcgtgcagcaggctaaggagatgacagaaactatggagaagaagttagtagaagaaacgaaacaactggaactcgaccttaatgatgaaaggctgagatatcagaaccttctgaatgagttcagtcgcctggaagaaagatatgatgacctcaaggaagagatgacccttatggtgcatgtgcctaagcctggacacaagagaacagactccacccacagcagcaacgagtctgaatatatctttagctctgaaattgcagaaatggaagacattccatcaaggacagaggaaccaagtgagaagaaggtacctctggacatgtcattgttccttaagctccagaagcgggtcacagagctggagcaggagaagcaggtgatgcaggatgagctggaccgcaaggaggagcaggtgctccgcagcaaggccaaggaagaagaaagaccacaaattagaggtgcagaactggaatatgagtcactcaagcgtcaagaactagaatcagaaaacaaaaaactgaagaatgagctaaatgagttgcgcaaggccctcagtgagaaaagtgccccagaggtgaccgccccaggtgcacctgcctaccgtgtcctcatggagcagctgacctctgtgagcgaggagcttgatgtccgcaaggaggaagtcctcatcttaaggtctcaactggtgagccagaaagaggccatccaacccaaggatgacaagaatacaatgacagattccacaatacttttggaagatgtacaaaaaatgaaagataaaggtgaaatagcacaagcatacattggtttgaaagaaacaaatagatcatctgctctggattaccatgagttgaatgaggatggagagctgtggctggtttatgaagggttaaaacaagccaataggctcctggaatcccagctgcagtcacagaagaggagccatgagaatgaggccgaggccctccgtggggagatccagagcctgaaggaggagaacaaccgacagcagcagctgctggcccagaacctgcagctgcccccagaggcccgcattgaggccagcctgcagcacgagatcacccggctgaccaacgaaaacttggatttgatggaacaacttgaaaaacaggataagacggtccgtaaactgaaaaaacaactgaaagtatttgccaaaaaaattggcgaactagaagtgggccagatggagaacatatccccaggacagatcattgatgaacccatccgaccagtcaacattcccaggaaagaaaaggatttccaagggatgctggaatacaagaaggaggatgagcaaaaacttgttaagaacctgattctggaactgaagccacgtggtgtagcagtcaatttgattccaggattaccggcatatatcctgttcatgtgtgttcgacatgctgactacctgaatgatgatcagaaagtaaggtcgttgctaacatcaacaattaacagcatcaaaaaagtattgaagaaaagaggtgatgattttgaaaccgtctccttctggctctctaacacatgccgatttttgcactgcttgaaacagtacagtggagaagagggctttatgaagcacaacacatctcgccagaatgaacactgcctcaccaattttgacctggctgagtatcggcaggtgctgagtgacttggccattcagatctaccagcagctcgtgcgggtgttagagaacatccttcagccaatgattgtctcaggcatgctggaacatgaaacgattcagggcgtgtctggggtgaagcccacagggttgagaaagcgaacctccagtatcgccgatgagggcacctacacactggactccatcctccggcagctcaactccttccactcggtcatgtgtcagcatggcatggaccctgaactgatcaagcaggtggtcaagcagatgttctacatcataggggccatcaccctgaacaaccttctcctgcggaaggacatgtgctcctggagtaaaggcatgcagatcaggtacaatgtcagtcaactggaagaatggctgcgtgacaagaatctgatgaatagtggggctaaagaaaccctggaacctctcattcaggctgctcaacttttgcaagtgaaaaagaaaacagatgatgatgcagaagccatttgttctatgtgcaatgctttaactactgcccagattgtgaaagtgttgaatttgtatactccagttaatgagtttgaagaaagagtctctgtgtcgttcattcgtactatacagatgcgtttacgagacaggaaagactctccccagctgctcatggatgctaaacacatctttcctgtcacctttcctttcaacccatcttccctcgcactagaaaccatccagattccagccagcctcggcctgggctttatttcacgggtctgaaagtgatgtccaggcaaaaattgacaatacatttcttgcccgaaataagaacccattatttccagtgagttactgaaaatacatttttaaagagaaagtactgattatctcccaaatgagaagtcattaactggaaatctccctagaatactttcatcactttggaaacaaagataggctctttcgtgctgtgttatctttatagcaacactcatccttaaccaactaggtaccgtgagtttacatacaggagaatgatggaaggaagggaggaaggaaaggaggagaaaaatgtgtcttcagctggcagcatttattttaaatccttagcactgagtttgaatggtataaaaagtataacttccatagatgagctgttgttaggaaggcaccaaagaacctcctctgcactaaacaggagaatggaaagaaaagtctccattgagtacatatcatgtcagtttagtaatcaattatgttgatattgttaaactggttcaaagaaataaactggcaatatgtaaagtaattcctcatttgtgtcactatgatatagagatattaaaggaatgttggtttgcta

SEQ ID NO: 353 - DNA, 1499 bp, Homo sapiens
  ref <308>: DATABASE ACCESSION NUMBER: U79298
  ref <309>: DATABASE ENTRY DATE: 2001-06-18
gaccgcccaccatgcccacggagaccctacagacaggtagcatggtgaagccggtcagccccgcgggcaccttcacctctgctgtgcccctgcgcatcctgaacaaggggccagactacttccgcaggcaggccgagcccaaccccaagaggctcagcgccgtggagaggctggaggccgacaaggccaagtacgtcaagagccaggaggtgatcaacgccaagcaggagcccgtgaagcccgccgtgctggccaagcccccggtgtgcccggctgccaagcgcgcactgggcagccccacgctcaaagtgttcggcaaccacgccaagaccgagagcggcgtgcagagggagaacctgaagctggagatcctgaagaacatcatcaatagctccgagggctctagctcgggctcggggcacaagcacagctcccgcaactggccgccccaccggtcggaagccactgacctgcaccgtcactccttcgcggagtccctgaaggtctaccccacgcagggccgcaggagcccgcaggagggcggctcccacgtgggcaggagactgctggagcagtcagccgagtccttcctccacgtgtcccacagctcttcggacatccgcaaggtgaccagcgtgaagcccctcaaggccatcccctgcagtagctctgcccctcccctgcctcccaagcccaaaatcgcagccatcgcctccatgaagtcccccgaggccgaccctgtggaaccagcttgtggagtcagccgaagaccctccctccagcggtctaagtcagacttgagtgacagatatttccgagtggacgcggacgtggagaggttcttcaactactgtggactggacccggaagagctggaaaacctgggaatggaaaactttgcaagggctaattctgacataatatccctcaacttccgcagcgcaagcatgatcagctcagactgtgaacagtctcaggacagtaacagtgaccttagaaatgatgacagtgccaatgaccgcgtgccgtatggcatttctgccatcgaaagaaatgctagaatcatcaagtggttatatagcatcaaacaagctagagagtcacagaaggtctcccatgtgtaagacagtgcgtggaaaggagggagcgtgggtctctgtgcttacgcagttgtgaaggttgtgaggtctccttgaagtgttgtgagcttctccactctttgtgttgcttgttgtgcaatgttttcaagttgcatgcttgtcaacatggggactgacctggcttccacgtcaccatcgctacagagcctggctgaacacgcgtcatctgccaaaagtttcaggccagaatctaattagggctttgctcgtaagcaaaactgtttacatgaaaatggtatacaacttcttcgatatttatgtggttcttgtgtttttatatcccgcgctattgtgtcttaattaaaagttttatcaactggcaaaaaaaaaaaaaaaaaa

SEQ ID NO: 354 - DNA, 3485 bp, Homo sapiens
  ref <308>: DATABASE ACCESSION NUMBER: AF001434
  ref <309>: DATABASE ENTRY DATE: 2001-06-18
ccctaccgcccccaattccgccctgcccccgccgcggcggcgctagccgccactgagggaccgaccctataaaggccgctccgcgaggggtgcgcagcattcggcagagggcgcttcgacgggctgggctgtgcgcctgcgcagtgtgggtcgctcccgattccctgccccggccggccccgcctcggctccgcaccctcgccccgctctcagccgccgctctgccccgcagcagccagccccgtgtccggcagtatgttcagctgggtcagcaaggatgcccgccgcaagaaggagccggagctcttccagacggtggccgaggggctgcggcagctgtacgcgcagaagctgctacccctggaggagcactaccgcttccacgagttccactcgcccgcrctggaggacgctgacttcgacaacaagcctatggtgctcctcgtgrggcagtacagcacgggcaagaccaccttcatccgacacctgatcgagcaggacttcccggggatgcgcatcgggcccgagcccaccaccgactccttcatcgccgtcatgcacggccccactgagggcgtggtgccgggcaacgcgctcgtggtggacccgcggcgccccttccgcaagctcaacgcgtttggcaacgctttcctcaacaggttcatgtgtgcccagctgcccaaccccgtcctggacagcatcagcatcatcgacacccccgggatcctgtctggagagaagcagcggatcagcagaggctatgactttgcagccgtcctggagtggttcgcggagcgtgtggaccgcatcatcctgctcttcgacgcccacaagctggacatctccgatgagttctcggaagtgatcaaggctctgaagaaccatgaggacaagatccgcgtggtgctgaacaaggcagaccagatcgagacgcagcagctgatgcgggtgtacggggccctcatgtggtccctgggcaagatcatcaacacccccgaggtggtcagggtctacatcggctccttctggtcccacccgctcctcatccccgacaaccgcaagctctttgaggccgaggagcaggacctcttcaaggacatccagtcactgccccgaaacgccgccctcaggaagctcaatgacctgatcaagcgggcacggctggccaaggttcacgcctacatcatcagctccctcaagaaagagatgcccaatgtctttggtaaagagagcaaaaagaaagagctggtgaacaacctgggagagatctaccagaagattgagcgcgagcaccagatctcccctggggacttcccgagcctccgcaagatgcaggaactcctgcagacccaggacttcagcaagttccaggcgctgaagcccaagctgctggacacggtggatgacatgctggccaacgacatcgcgcggctgatggtgatggtgcggcaggaggagtccctgatgccttcccaggtggtcaagggcggcgcctttgacggcaccatgaacgggccgttcgggcacggctacggcgagggggccggcgagggcatccacgacgtggagtgggtggtgggcaaggacaagcccacctacgacgagatcttctacacgctgtcccctgtcaacggcaagatcacgggcgccaacgccaagaaggagatggtgaagtccaagctccccaacaccgtgctagggaagatctggaagctggccgacgtggacaaggacgggctgctggacgacgaggagttcgcgctggccaaccacctcatcaaggtcaagctggagggccacgagctgcccgccgacctgcccccgcacctggtgccgccctccaagcgcagacatgagtgatggcgcccggccccgcacctgccatttgcacgcccggccgggaggcagagacggggggaggggaagcctcaccatttctcaaggtccataaagactgagcggatgtttcctcgcctctcgaaaaggaaaaccaccatctttcttttaaggctgttcctgggcctggcgggggaggcaggggtgagaggatggaattgtgtgcacaagaactgtggctattttaatatataacgttagaggctgcgttctttgtcgccgcctcccctgtgtgccagccctgtgtgcacggcctctgccccccggccttgtgctgtggctggagctggacagtgcagtgactgcgaccgtgggggagccaggtcgcccttttggcagctgctaggctgaggctgcatggacaggaacaccaggcaccctccgtgtgcttctgagctgaggttgcttcacgggaccgtggcttccttcctcacctggctctgcctcccccgtgctctcgggcgaagtgggttcttgtgccttcccctcccgggcccaggctccccgtgcgcgggccctgccctttcctcccgcgccccaccggctccgacgcgcaaccccgctcagcagtcacagaagcagggcccagccaccttggtctttttttgggagttcaggggagtaggagaatgtcttccagaaaaatacataagctagtttctgttctgtaaagtgatatctttcatacttgaccaaagttcccaataacttcccaaccactgttcaaaagctgtgatttttgtctccccttcccaccctccagccaaggagcagccctgcccaggggaatttaggtgtgggtacccggggagcaccccgttcctggaccccagtgttgcatttcctggctgaggaagggtggtcatcccagctcctgccctaccctctcacttaactggagctttgggacgcaccctccacagtgggaggtggtggtggggtggcggtggcggggcctcacgacagcttggtgctggtaagaggaagcccgtggttctggctaggctctcatgtccagacagcggggaccaggggaaaacccagccccttctgtaatcccccttcatttcctaccttccttcctcctctgtttagcaaaggagggcagctcacttggatgtccttacaacgcccctggccccaggttgagcaataagaaaccagaaccttgcggcccagtggcccgggccagttcaggccgcctccccctcctctgcctggggccattgagccccagcctccaggggcccgggtgcgtttgcaagccagtggccactgtccgggctgtgatggcaccaaggcaggtggagcaccaggtaccacacagctgggcttcccaccaggctttcccgcgggggtctcagggagcttctccccagcgctgctcggagtctgcaggaactggccttgttctccttagcccgtcactccatacagtattaggtgaggatggatgcgggcgctgtccttgccgggaagtcactgttgaagttgcagtggcttgttcacacctgtgggaagagaagtgaagactttctccttgcattaaaaagtctgaactgtgaaaaaaaaaaaaaaaaaaaaaaaaa

SEQ ID NO: 355 - DNA, 2414 bp, Homo sapiens
  ref <308>: DATABASE ACCESSION NUMBER: X89478
  ref <309>: DATABASE ENTRY DATE: 2001-06-18
gcgggcccccggcgcagcgctgcccggctcccggccctgccggcctcctcccttggcgccgcggccatggcggccagcgcgaagcggaagcaggaggagaagcacctgaagatgctgcgggacatgaccggcctcccgcgcaaccgaaagtgcttcgactgcgaccagcgcggccccacctacgttaacatgacggtcggctccttcgtgtgtacctcctgctccggcagcctgcgaggattaaatccaccacacagggtgaaatctatctccatgacaacattcacacaacaggaaattgaattcttacaaaaacatggaaatgaagtctgtaaacagatttggctaggattatttgatgatagatcttcagcaattccagacttcagggatccacaaaaagtgaaagagtttctacaagaaaagtatgaaaagaaaagatggtatgtcccgccagaacaagccaaagtcgtggcatcagttcatgcatctatttcagggtcctctgccagtagcacaagcagcacacctgaggtcaaaccactgaaatctcttttaggggattctgcaccaacactgcacttaaataagggcacacctagtcagtccccagttgtaggtcgttctcaagggcagcagcaggagaagaagcaatttgaccttttaagtgatctcggctcagacatctttgctgctccagctcctcagtcaacagctacagccaattttgctaactttgcacatttcaacagtcatgcagctcagaattctgcaaatgcagattttgcaaactttgatgcatttggacagtctagtggttcgagtaattttggaggtttccccacagcaagtcactctccttttcagccccaaactacaggtggaagtgctgcatcagtaaatgctaattttgctcattttgataacttccccaaatcctccagtgctgattttggaaccttcaatacttcccagagtcatcaaacagcatcagctgttagtaaagtttcaacgaacaaagctggtttacagactgcagacaaatatgcagcacttgctaatttagacaatatcttcagtgccgggcaaggtggtgatcagggaagtggctttgggaccacaggtaaagctcctgttggttctgtggtttcagttcccagtcagtcaagtgcatcttcagacaagtatgcagctctggcagaactagacagcgttttcagttctgcagccacctccagtaatgcgtatacttccacaagtaatgctagcagcaatgtttttggaacagtgccagtggttgcttctgcacagacacagcctgcttcatcaagtgtgcctgctccatttggacgtacgccttccacaaatccatttgttgctgctgctggtccttctgtggcatcttctacaaacccatttcagaccaatgccagaggagcaacagcggcaacctttggcactgcatccatgagcatgcccacgggattcggcactcctgctccctacagtcttcccaccagctttagtggcagctttcagcagcctgcctttccagcccaagcagctttccctcaacagacagctttttctcaacagcccaatggtgcaggttttgcagcatttggacaaacaaagccagtagtaaccccttttggtcaagttgcagctgctggagtatctagtaatccttttatgactggtgcaccaacaggacaatttccaacaggaagctcatcaaccaatcctttcttatagccttatatagacaatttactggaacgaacttttatgtggtcacattacatctctccacctcttgcactgttgtcttgtttcactgatcttagctttaaacacaagagaagtctttaaaaagcctgcattgtgtattaaacaccaggtaatatgtgcaaaaccgagggctccagtaacaccttctaacctgtgaattggcagaaaagggtagcggtatcatgtatattaaaattggctaatattaagttattgcagataccacattcattatgctgcagtactgtacatatttttcttagaaattagctatttgtgcatatcagtatttgtaactttaacacattgttatgtgagaaatgttactggggaaatagatcagccacttttaaggtgctgtcatatatcttggaatgaatgacctaaaatcattttaaccattgctactggaaagtaacagagtcaaaattggaaggttttattcattcttgaatttttcctttctaaagagctcttctatttatacatgcctaaattcttttaaaatgtagagggatacctgtctgcataataaagctgatcatgttttgctacagtttgcaggtgaaaaaaaataaatattataaaataaaaaaaaaaaaaaagaaaaaaaaaaggaattc

SEQ ID NO: 356 - DNA, 352 bp, Homo sapiens
  ref <308>: DATABASE ACCESSION NUMBER: AA988547
  ref <309>: DATABASE ENTRY DATE: 2001-06-18
aatttgaataaaaagaattagaagtgatgtccttttataaaatgccttctcccccttcccgcctacagtctcttcctctccccttagagggggaaagtgtataaacctacagggttgtgagtctgaaaagaggatccccctcacccccaccctgggcagagcagtgggggttggcgggtgggagagggggacacagatcctggcacactgtggatatttcttgcagattgcagtctcttgtggcccaaacaggttaggtagactatcgcctctggagagtgccaccttttggtaccaacatgttctgaggtgttaggatttgggttgggttttttttgtttgtttttttttt

SEQ ID NO: 357 - DNA, 375 bp, Homo sapiens
  ref <308>: DATABASE ACCESSION NUMBER: AI393246
  ref <309>: DATABASE ENTRY DATE: 2001-06-18
cccgcgctccgcgctagcccctcctgagctcaggcggggcgaagagtcgcctccatccgcccgcggcgctctcctaccagtctcttcagcgcggccctcgaggcagaggcaaaggcggcgacagctcctcacccctggcctccccaggagccacggcggcgggagggccctaccccgcccgcccgaccgcggttttcccaccctggccgctcccgcagtggggagggacccaccggtttgcccagaccctcggctccaaccccgagcgcccgcctagcctcggagcccgcccctcgcctcttccttagcactcgcagttagaaaaggcgacaccgtagactaaggtggggacccagacagaggccgagaaggtgc

SEQ ID NO: 358 - DNA, 433 bp, Homo sapiens
  Modified_base 1 ... 433: n = a,c,g, or t
  ref <308>: DATABASE ACCESSION NUMBER: AA961586
  ref <309>: DATABASE ENTRY DATE: 2001-06-18
taactaaagatcaggtaactctttccaaaaagaaactcagtctaagggggtagaactgttctgattgaacaagtagctgtgtcaatcatttcaaccctagactcctggcgccgagaatttgggggcggcgcaacccgggggcggggcaagcggaggcanggctcccagtgcgtggcttttctgtctccgccccctgaattttgcattctgcgtttccagggcccctcatgcacttaatccacacccacttgtgatctggtttaagagattggggagggcggggtggggggattgcggagggaggaattgcggggcgggggtggaagtggtggtggtgccaggaatctgcataggcgaggaagttgaaagctctgaatctcacatccccttttgcctcccagccctatgtccacctttcatcctaggtaaaatc

SEQ ID NO: 359 - DNA, 392 bp, Homo sapiens
  Modified_base 1 ... 392: n = a,c,g, or t
  ref <308>: DATABASE ACCESSION NUMBER: H29746
  ref <309>: DATABASE ENTRY DATE: 2001-06-18
ggtccccctcgacggcagccctcccggagagggcttgcctcggngcggcgcgggnttcttgtgccgggagacagggaaggttcgtgctctgcaccggcgcccccctgcggctcccggccccagacagcgtcccttgagggccgggctcgttctccagagcctcccgttccggccggtggacgacgccgcagcttgacgtcttcggggacgtcctgggggtggcggttcggcccccaacgttctcggtctcttcctccccggacacccggaggcctgcgggcggcttagaggacgtttggcccggcccgccgccaaagattaggggcctgatgtttccgctanagccagaaggtncgttttggggcccggggcgnccccgagaagatttcata

SEQ ID NO: 360 - DNA, 360 bp, Homo sapiens
  ref <308>: DATABASE ACCESSION NUMBER: AI493593
  ref <309>: DATABASE ENTRY DATE: 2001-06-18
tttttttttttttttttttttttttttttttttttttttttttttttttttaaccggtatcaaactttggtttattggaaaatttaacaaagttttttttggaatccccgcccccttggtttgaaaacaaaagcaaaaacataatttttggttatttttttccccctcctttgtttgggctcctggaaaaaaagggggaaaatctttgtgataaataaaaaatagggatgtccccgaaaaaaataaatcccctccgatgaaaagttttgggagcacccgcaatgcccttaagcagtttcaaaatcagcttcttttaaaaagggccttttattaaaataaaaatcccccccaaaattttgc

SEQ ID NO: 361 - DNA, 1206 bp, Homo sapiens
  ref <308>: DATABASE ACCESSION NUMBER: D38305
  ref <309>: DATABASE ENTRY DATE: 2001-06-18
gttgctgtcggggagttgaaacctaattttgtggcgtagagctatgcagcttgaaatccaagtagcactaaattttattatttcgtatttgtacaataagcttcccaggagacgtgtcaacatttttggtgaagaacttgaaagacttcttaagaagaaatatgaagggcactggtatcctgaaaagccatacaaaggatcggggtttagatgtatacacataggggagaaagtggacccagtgattgaacaagcatccaaagagagtggtttggacattgatgatgttcgtggcaatctgccacaggatcttagtgtttggatcgacccatttgaggtttcttaccaaattggtgaaaagggaccagtgaaggtgctttacgtggatgataataatgaaaatggatgtgagttggataaggagatcaaaaacagctttaacccagaggcccaggtttttatgcccataagtgacccagcctcatcagtgtccagctctccatcgcctccttttggtcactctgctgctgtaagccctaccttcatgccccggtccactcagcctttaacctttaccactgccacttttgctgccaccaagttcggctctaccaaaatgaagaatagtggccgtagcaacaaggttgcacgtacttctcccatcaacctcggcttgaatgtgaatgacctcttgaagcagaaagccatctcttcctcaatgcactctctgtatgggcttggcttgggtagccagcagcagccacagcaacagcagcagccagcccagccgccaccgccaccaccaccaccacagcagcaacaacagcagaaaacctctgctctttctcctaatgccaaggaatttatttttcctaatatgcagggtcaaggtagtagtaccaatggaatgttcccaggtgacagcccccttaacctcagtcctctccagtacagtaatgcctttgatgtgtttgcagcctatggaggcctcaatgagaagtcttttgtagatggcttgaattttagcttaaataacatgcagtattctaaccagcaattccagcctgttatggctaactaaaaaaaagaaaatgtatcgtacaagttaaaatgcacgggcccaagggggattttttttttcacctccttgagaatttttttttttttaagcttatagtaaggatacattcaagcttgggttaaaaa

SEQ ID NO: 362 - DNA, 474 bp, Homo sapiens
  ref <308>: DATABASE ACCESSION NUMBER: AI378555
  ref <309>: DATABASE ENTRY DATE: 2001-06-18
cattcttttccaatgtacaaaggtccattggatggaagatgtattccgcatagtcagggtgctgttccaatggaacgggcttctggaatgcatctgtccctggctgtttcattttctgaatggcaaacttgagcaggtaggataactgttcaatggtgagcattgtcatggctttactctgggtctcgatgcattctgctactgtaattttctcacattcaggacaaaaccagtccccctctggttccgatgtcagtctcagacacttagcgtgataaacccggggacagagctcacagcaaaggacttggccttcccggtgacaaacccagcagtagaaatcattccgtccatcctgcggtacaacatcaacagggtctgtggtgagtggctgcttcatatagtaaaacggaccatgtcttagttctgactgctccttattgttactgttcagtaagccaggtttctttttct

SEQ ID NO: 363 - DNA, 457 bp, Homo sapiens
  ref <308>: DATABASE ACCESSION NUMBER: AI205344
  ref <309>: DATABASE ENTRY DATE: 2001-06-18
cctgtcctgcccctccagagtaccccacgcacccccaggaccttcgccgtctccgtgccagcgttcacgctccctcccggggccctgcctcggagctctgtggtggaaggacgggagagggccccggacacgcgcgtcttctcctgccgaacgcaggggctgccctgactttgctctgccgccccccggggacccggggcctggggtctctgtggtgcctgcagcaggagccaggaacgcccggcaggcaggcgctctcccgccagtgtctggattctgcctcttgccaaagcagagggggctgccatcccctgcctgccacctgcccctcggctgcatgcccacagccgtacctgcctgaggacaaaggcttgcactgtctcgcccgcgcctggcccccaccccctccccggccagcctgaggctgcctgaggaaggaaggacccgcttcctgttg

SEQ ID NO: 364 - DNA, 447 bp, Homo sapiens
  ref <308>: DATABASE ACCESSION NUMBER: AA868506
  ref <309>: DATABASE ENTRY DATE: 2001-06-18
tttataacttaataattttatttaaaatcatccaacaaaacctcaaactccaaggacacctcgttcattaaggagaaagggcattgattggactcgaagagggaggaggacaaagaaaggcgattatccggcctggctcctagcagggcgcgctcccgtgggctctgccgcgaaccgctgcctccccgggtgcaggtcgttttcccgcccgcgctgaactcggggtacagggacacgtcgctgcgcctcggcctgccgctgtggagggcttcggcgggaaaagggagcacctcgggaggcagcgagcacccggctgtcgcgccgctcgccacggggtccaactttggagagcggcgtcgttcccccgcccctcaagcccctcagggcctgacaatctcgcgttcaaatttggcgggatccgagtccgcagagccgagggggcgcgaa

SEQ ID NO: 365 - DNA, 490 bp, Homo sapiens
  ref <308>: DATABASE ACCESSION NUMBER: AI673085
  ref <309>: DATABASE ENTRY DATE: 2001-06-18
aaaagtcattgctcatttaatcttggaggccacttggaggagcatggcgtctttgtctcgccctgggtgagcacaccgaggcccagagtttgatgattccttcaaggtctcaaagcttgccttcttcacagcgcttggtgatgcacgtggttgtttctcagtatggtttgccaaagggatgctctgattcaggaggctgaggtggggcctgggaatgttcatttctaaccttttcccaggtgatgctgaggccactggtccaggggccacctttggccctaagccgctaattaacaacatgagtcactttcatctggtccaggcttgtcgccccctcgatggaacacagagctccctctttccctcttggcctcatcaccagcccccagaacaggacccagcactagcagcactgaatcgtgtttgttggtgaactgatgcgtcgtgatcctgggtgagacaaggacggccgcgggagaggcggaactgg

SEQ ID NO: 366 - DNA, 2988 bp, Homo sapiens
  ref <308>: DATABASE ACCESSION NUMBER: U33053
  ref <309>: DATABASE ENTRY DATE: 2001-06-18
tgagtaaatcgatacatcatacgcgcgctcctctggccgcccctccctccgacgatcggggaccctggcgggcggcaggaggacatggccagcgacgccgtgcagagtgagcctcgcagctggtccctgctagagcagctgggcctggccggggcagacctggcggcccccggggtacagcagcagctggagctggagcgggagcggctgcggcgggaaatccgcaaggagctgaagctgaaggagggtgctgagaacctgcggcgggccaccactgacctgggccgcagcctgggccccgtagagctgctgctgcggggctcctcgcgccgcctcgacctgctgcaccagcagctgcaggagctgcacgcccacgtggtgcttcccgacccggcggccacccacgatggcccccagtcccctggtgcgggtggccccacctgctcggccaccaacctgagccgcgtggcgggcctggagaagcagttggccattgagctgaaggtgaagcagggggcggagaacatgatccagacctacagcaatggcagcaccaaggaccggaagctgctgctgacagcccagcagatgttgcaggacagtaagaccaagattgacatcatccgcatgcaactccgccgggcgctgcaggccgaccagctggagaaccaggcagccccggatgacacccaagggagtcctgacctgggggctgtggagctgcgcatcgaagagctgcggcaccacttccgagtggagcacgcggtggccgagggtgccaagaacgtactgcgcctgctcagcgctgccaaggccccggaccgcaaggcagtcagcgaggcccaggagaaattgacagaatccaaccagaagctggggctgctgcgggaggctctggagcggagacttggggagctgcccgccgaccaccccaaggggcggctgctgcgagaagagctcgctgcggcctcctccgctgccttcagcacccgcctggccgggccctttcccgccacgcactacagcaccctgtgcaagcccgcgccgctcacagggaccctggaggtacgagtggtgggctgcagagacctcccagagaccatcccgtggaaccctaccccctcaatggggggacctgggaccccagacagccgcccccccttcctgagccgcccagcccggggcctttacagccgaagcggaagcctcagtggccggagcagcctcaaagcagaagccgagaacaccagtgaagtcagcactgtgcttaagctggataacacagtggtggggcagacgtcttggaagccatgtggccccaatgcctgggaccagagcttcactctggagctggaaagggcacgggaactggagttggctgtgttctggcgggaccagcggggcctgtgtgccctcaaattcctgaagttggaggatttcttggacaatgagaggcatgaggtgcagctggacatggaaccccagggctgcctggtggctgaggtcaccttccgcaaccctgtcattgagaggattcctcggctccgacggcagaagaaaattttctccaagcagcaagggaaggcgttccagcgtgctaggcagatgaacatcgatgtcgccacgtgggtgcggctgctccggaggctcatccccaatgccacgggcacaggcacctttagccctggggcttctccaggatccgaggcccggaccacgggtgacatatcggtggagaagctgaacctcggcactgactcggacagctcacctcagaagagctcgcgggatcctccttccagcccatcgagcctgagctcccccatccaggaatccactgctcccgagctgccttcggagacccaggagaccccaggccccgccctgtgcagccctctgaggaagtcacctctgaccctcgaagatttcaagttcctggcggtgctgggccggggtcattttgggaaggtgctcctctccgaattccggcccagtggggagctgttcgccatcaaggctctgaagaaaggggacattgtggcccgagacgaggtggagagcctgatgtgtgagaagcggatattggcggcagtgaccagtgcgggacaccccttcctggtgaacctcttcggctgtttccagacaccggagcacgtgtgcttcgtgatggagtactcggccggtggggacctgatgctgcacatccacagcgacgtgttctctgagccccgtgccatcttttattccgcctgcgtggtgctgggcctacagtttcttcacgaacacaagatcgtctacagggacctgaagttggacaatttgctcctggacaccgagggctacgtcaagatcgcagactttggcctctgcaaggaggggatgggctatggggaccggaccagcacattctgtgggaccccggagttcctggcccctgaggtgctgacggacacgtcgtacacgcgagctgtggactggtggggactgggtgtgctgctctacgagatgctggttggcgagtccccattcccaggggatgatgaggaggaggtcttcgacagcatcgtcaacgacgaggttcgctacccccgcttcctgtcggccgaagccatcggcatcatgagaaggctgcttcggaggaacccagagcggaggctgggatctagcgagagagatgcagaagatgtgaagaaacagcccttcttcaggactctgggctgggaagccctgttggcccggcgcctgccaccgccctttgtgcccacgctgtccggccgcaccgacgtcagcaacttcgacgaggagttcaccggggaggcccccacactgagcccgccccgcgacgcgcggcccctcacagccgcggagcaggcagccttcctggacttcgacttcgtggccgggggctgctagccccctcccctgcccctgcccctgcccctgcccgagagctcttagtttttaaaaaggcctttgggatttgccgga
